(19) United States
(12) Patent Application Publication
(10) Pub. No.: US 2019/0062777 A1
(43) Pub. Date: Feb. 28, 2019

(54) PLANTS HAVING INCREASED TOLERANCE TO HERBICIDES

(71) Applicant: BASF AGRO B.V., EA Arnheim (NL)

(72) Inventors: Raphael Aponte, Mannheim (DE); Stefan Tresch, Neustadt Hambach (DE); Dario Massa, Mannheim (DE); Tobias Seiser, Mannheim (DE); Thomas Mietzner, Annweiler (DE)

(21) Appl. No.: 15/736,423

(22) PCT Filed: Jun. 15, 2016
(86) PCT No.: PCT/IB2016/053512

§ 371 Date: Dec. 14, 2017

(30) Foreign Application Priority Data
Jun. 17, 2015 (EP) 15172587.6

(51) Int. Cl. C12N 15/82; C12N 9/02; A01N 43/54; A01N 43/84; A01N 37/40; A01N 43/653

(52) U.S. Cl. CPC C12N 15/8274; C12Y 103/03004; C12N 9/001; A01N 43/653; A01N 43/84; A01N 37/40; A01N 43/54

(57) ABSTRACT

The present invention provides a method for controlling undesired vegetation at a plant cultivation site, the method comprising the steps of providing a plant that comprises at least one nucleic acid comprising a nucleotide sequence encoding a wild-type or a mutated protoporphyrinogen oxidase (PPO) which is resistant or tolerant to a PPO-inhibiting herbicide by applying to said site an effective amount of said herbicide. The invention also provides plants comprising wild-type or mutated PPO enzymes, and methods of obtaining such plants.

### FIELD OF THE INVENTION

[0001] The present invention relates in general to methods for conferring on plants agricultural level tolerance to a herbicide. Particularly, the invention refers to plants having an increased tolerance to PPO-inhibiting herbicides. More specifically, the present invention relates to methods and plants obtained by mutagenesis and cross-breeding and transformation that have an increased tolerance to PPO-inhibiting herbicides.

### BACKGROUND OF THE INVENTION

[0002] Herbicides that inhibit protoporphyrinogen oxidase (hereinafter referred to as Protox or PPO; EC:1.3.3.4), a key enzyme in the biosynthesis of protoporphyrin IX, have been used for selective weed control since the 1960s. PPO catalyzes the last common step in chlorophyll and heme biosynthesis which is the oxidation of protoporphyrinogen IX to protoporphyrin IX. (Matringe et al. 1989. Biochem. 1. 260: 231). PPO-inhibiting herbicides include many different structural classes of molecules (Duke et al. 1991. Weed Sci. 39: 465; Nandihalli et al. 1992. Pesticide Biochem. Physiol. 43: 193; Matringe et al. 1989. FEBS Lett. 245: 35; Yanase and Andoh. 1989. Pesticide Biochem. Physiol. 35: 70). These herbicidal compounds include the diphenylethers {e.g. lactofen, (+−)-2-ethoxy-1-methyl-2-oxoethyl 5-{2-chloro-4-(trifluoromethyl)phenoxy}-2-nitrobenzoate; acifluorfen, 5-{2-chloro-4-(trifluoromethyl)phenoxy}-2-nitrobenzoic acid; its methyl ester; or oxyfluorfen, 2-chloro-1-(3-ethoxy-4-nitrophenoxy)-4-(trifluorobenzene)}, oxidiazoles, (e.g. oxidiazon, 3-{2,4-dichloro-5-(1-methylethoxy)phenyl}-5-(1,1-dimethylethyl)-1,3,4-oxadiazol-2-(3H)-one), cyclic imides (e.g. S-23142, N-(4-chloro-2-fluoro-5-propargyloxyphenyl)-3,4,5,6-tetrahydrophthalimide; chlorophthalim, N-(4-chlorophenyl)-3,4,5,6-tetrahydrophthalimide), phenyl pyrazoles (e.g. TNPP-ethyl, ethyl 2-{1-(2,3,4-trichlorophenyl)-4-nitropyrazolyl-5-oxy}propionate; M&B 39279), pyridine derivatives (e.g. LS 82-556), and phenopylate and its O-phenylpyrrolidino- and piperidinocarbamate analogs. Many of these compounds competitively inhibit the normal reaction catalyzed by the enzyme, apparently acting as substrate analogs.

[0003] Application of PPO-inhibiting herbicides results in the accumulation of protoporphyrinogen IX in the chloroplast and mitochondria, which is believed to leak into the cytosol where it is oxidized by a peroxidase. When exposed to light, protoporphyrin IX causes formation of singlet oxygen in the cytosol and the formation of other reactive oxygen species, which can cause lipid peroxidation and membrane disruption leading to rapid cell death (Lee et al. 1993. Plant Physiol. 102: 881).

[0004] Not all PPO enzymes are sensitive to herbicides which inhibit plant PPO enzymes. Both the Escherichia coli and Bacillus subtilis PPO enzymes (Sasarmen et al. 1993. Can. J. Microbiol. 39: 1155; Dailey et al. 1994. J. Biol. Chem. 269: 813) are resistant to these herbicidal inhibitors. Mutants of the unicellular alga Chlamydomonas reinhardtii resistant to the phenylimide herbicide S-23142 have been reported (Kataoka et al. 1990. J. Pesticide Sci. 15: 449; Shibata et al. 1992. In Research in Photosynthesis, Vol. III, N. Murata, ed. Kluwer: Netherlands. pp. 567-70). At least one of these mutants appears to have an altered PPO activity that is resistant not only to the herbicidal inhibitor on which the mutant was selected, but also to other classes of protox inhibitors (Oshio et al. 1993. Z. Naturforsch. 48c: 339; Sato et al. 1994. In ACS Symposium on Porphyric Pesticides, S. Duke, ed. ACS Press: Washington, D.C.). A mutant tobacco cell line has also been reported that is resistant to the inhibitor S-21432 (Che et al. 1993. Z. Naturforsch. 48c: 350). Auxotrophic E. coli mutants have been used to confirm the herbicide resistance of cloned plant PPO-inhibiting herbicides.

[0005] Three main strategies are available for making plants tolerant to herbicides, i.e. (1) detoxifying the herbicide with an enzyme which transforms the herbicide, or its active metabolite, into non-toxic products, such as, for example, the enzymes for tolerance to bromoxynil or to basta (EP242236, EP337899); (2) mutating the target enzyme into a functional enzyme which is less sensitive to the herbicide, or to its active metabolite, such as, for example, the enzymes for tolerance to glyphosate (EP293356, Padgette S. R. et al., J. Biol. Chem., 266, 33, 1991); or (3) overexpressing the sensitive enzyme so as to produce quantities of the target enzyme in the plant which are sufficient in relation to the herbicide, in view of the kinetic constants of this enzyme, so as to have enough of the functional enzyme available despite the presence of its inhibitor. The third strategy was described for successfully obtaining plants which were tolerant to PPO inhibitors (see e.g. U.S. Pat. No. 5,767,373 or U.S. Pat. No. 5,939,602, and patent family members thereof.). In addition, US 2010/0100988 and WO 2007/024739 discloses nucleotide sequences encoding amino acid sequences having enzymatic activity such that the amino acid sequences are resistant to PPO inhibitor herbicidal chemicals, in particular 3-phenyluracil inhibitor specific PPO mutants.

[0006] WO 2012/080975 discloses plants the tolerance of which to a PPO-inhibiting herbicide named “benzoxazinone-derivative” herbicide (1,5-dimethyl-6-thioxo-3-(2,2,7-trifluoro-3-oxo-4-(prop-2-ynyl)-3,4-dihydro-2H-benzo[b][1,4]oxazin-6-yl)-1,3,5-triazinane-2,4-dione) had been increased by transforming said plants with nucleic acids encoding mutated PPO mutated enzymes. In particular, WO 2012/080975 discloses that the introduction of nucleic acids which code for a mutated PPO of an Amaranthus type II PPO in which the Arginine at position 128 had been replaced by a leucine, alanine, or valine, and the phenylalanine at position 420 had been replaced by a methionine, cysteine, isoleucine, leucine, or threonine, confers increased tolerance/resistance to a benzoxazinone-derivative herbicide. Furthermore, WO 2013/189984 discloses that the introduction of nucleic acids which code for a mutated PPO having a substitution corresponding to the Leucine at position 397, and a substitution corresponding to the phenylalanine at position 420 in the Amaranthus type II PPO, confers increased tolerance/resistance to a variety of PPO inhibitors herbicide. Furthermore, WO2015/022636 discloses novel substitutions for R128, and F420 corresponding to the Amaranthus type II PPO which are not disclosed in WO 2012/080975.

[0007] The inventors of the present invention have now surprisingly found that those types of single- and and double-mutants and, furthermore, novel substitutions for R128, L397 and F420 which are not disclosed in the prior art confer increased tolerance/resistance to a wide variety of PPO inhibitors when transferred to PPO enzymes derived from organisms other than Amaranthus, for example PPO like enzymes from microorganisms (e.g. bacteria), such as those shown in SEQ ID NO: 1, 2, 3, 4, 5, 6, 7, 8, 9, 10, 11, 12, 13, 14, 15, 16, 17, 18, 19, 20, 21, 22, 23, 24, 25, 26, 27, 28, 29, 30, 31, 32, 33, 34, 35, 36, 37, 38, 39, 40, 41, 42, 43, 44, 45, 46, 47, 48, 49, 50, 51, 52, 53, 54, 55, 56, 57, 58, 59, 60, 61, 62, 63, 64, 65, 66, 67, 68, 69, 70, 71, 72, 73, 74, 75, 76, 77, 78, 79, 80, 81, 82, 83, 84, 85, 86, 87, 88, 89, 90, 91, 92, 93, 94, 95, 96, 97, 98, 99, 100, 101, 102, 103, 104, 105, 106, 107, 108, 109, 110, 111, 112, 113, 114, 115, 116, 117, 118, 119, 120, 121, 122, 123, 124, 125, 126, 127, 128, 129, 130, 131, 132, 133, 134, 135, 136, 137, 138, 139, 140, 141, 142, 143, 144, 145, 146, 147, 148, 149, 150, 151, 152, 153, 154, 155, 156, 157, 158, 159, 160, 161, 162, 163, 164, 165, 166, 167, 168, 169, 170, 171, 172, 173, 174, 175, 176, 177, 178, 179, 180, 181, 182, 183, 184, 185, 186, 187, 188, 189, 190, 191, 192, 193, 194, 195, 196, 197, 198, 199, 200, 201, 202, 203, 204, 205, 206, 207, 208, 209, 210, 211, 212, 213, 214, 215, 216, 217, 218, 219, 220, 221, 222, 223, 224, 225, 226, 227, 228, 229, 230, 231, 232, 233, 234, 235, 236, 237, 238, 239, 240, 241, 242, 243, 244, 245, 246, 247, 248, 249, 250, 251, 252, 253, 254, 255, 256, 257, 258, 259, 260, 261, 262, 263, 264, 265, 266, 267, 268, 269, 270, 271, 272, 273, 274, 275, 276, 277, 278, 279, 280, 281, 282, 283, 284, 285, 286, 287, 288, 289, 290, 291, 292, 293, 294, 295, 296, 297, 298, 299, 300, 301, 312, or 313.Thus, to date, the prior art has not described PPO-inhibiting herbicide tolerant plants containing a mutated PPO nucleic acid according to the present invention, which are tolerant/resistant to a broad spectrum of PPO inhibitors. Therefore, what is needed in the art are crop plants and crop plants having increased tolerance to herbicides such as PPO-inhibiting herbicide and containing at least one wildtype and/or mutated PPO nucleic acid according to the present invention. Also needed are methods for controlling weed growth in the vicinity of such crop plants or crop plants. These compositions and methods would allow for the use of spray over techniques when applying herbicides to areas containing crop plants or crop plants.

### SUMMARY OF THE INVENTION

[0008] The problem is solved by the present invention which refers to a method for controlling undesired vegetation at a plant cultivation site, the method comprising the steps of:
[0009] a) providing, at said site, a plant that comprises at least one nucleic acid comprising a nucleotide sequence encoding a wild type protoporphyrinogen oxidase (PPO) or a mutated protoporphyrinogen oxidase (mutated PPO) which is resistant or tolerant to a PPO-inhibiting herbicide, and which comprises the amino acid sequence of SEQ ID NO: 1, 2, 3, 4, 5, 6, 7, 8, 9, 10, 11, 12, 13, 14, 15, 16, 17, 18, 19, 20, 21, 22, 23, 24, 25, 26, 27, 28, 29, 30, 31, 32, 33, 34, 35, 36, 37, 38, 39, 40, 41, 42, 43, 44, 45, 46, 47, 48, 49, 50, 51, 52, 53, 54, 55, 56, 57, 58, 59, 60, 61, 62, 63, 64, 65, 66, 67, 68, 69, 70, 71, 72, 73, 74, 75, 76, 77, 78, 79, 80, 81, 82, 83, 84, 85, 86, 87, 88, 89, 90, 91, 92, 93, 94, 95, 96, 97, 98, 99, 100, 101, 102, 103, 104, 105, 106, 107, 108, 109, 110, 111, 112, 113, 114, 115, 116, 117, 118, 119, 120, 121, 122, 123, 124, 125, 126, 127, 128, 129, 130, 131, 132, 133, 134, 135, 136, 137, 138, 139, 140, 141, 142, 143, 144, 145, 146, 147, 148, 149, 150, 151, 152, 153, 154, 155, 156, 157, 158, 159, 160, 161, 162, 163, 164, 165, 166, 167, 168, 169, 170, 171, 172, 173, 174, 175, 176, 177, 178, 179, 180, 181, 182, 183, 184, 185, 186, 187, 188, 189, 190, 191, 192, 193, 194, 195, 196, 197, 198, 199, 200, 201, 202, 203, 204, 205, 206, 207, 208, 209, 210, 211, 212, 213, 214, 215, 216, 217, 218, 219, 220, 221, 222, 223, 224, 225, 226, 227, 228, 229, 230, 231, 232, 233, 234, 235, 236, 237, 238, 239, 240, 241, 242, 243, 244, 245, 246, 247, 248, 249, 250, 251, 252, 253, 254, 255, 256, 257, 258, 259, 260, 261, 262, 263, 264, 265, 266, 267, 268, 269, 270, 271, 272, 273, 274, 275, 276, 277, 278, 279, 280, 281, 282, 283, 284, 285, 286, 287, 288, 289, 290, 291, 292, 293, 294, 295, 296, 297, 298, 299, 300, 301, 312, or 313, or a variant thereof
[0010] b) applying to said site an effective amount of said herbicide.

[0011] Another object refers to a method of identifying a nucleotide sequence encoding a mutated PPO which is resistant or tolerant to a PPO-inhibiting herbicide, the method comprising:
[0012] a) generating a library of mutated PPO-encoding nucleic acids,
[0013] b) screening a population of the resulting mutated PPO-encoding nucleic acids by expressing each of said nucleic acids in a cell or plant and treating said cell or plant with a PPO-inhibiting herbicide,
[0014] c) comparing the PPO-inhibiting herbicide-tolerance levels provided by said population of mutated PPO encoding nucleic acids with the PPO-inhibiting herbicide-tolerance level provided by a control PPO-encoding nucleic acid,
[0015] d) selecting at least one mutated PPO-encoding nucleic acid that provides a significantly increased level of tolerance to a PPO-inhibiting herbicide as compared to that provided by the control PPO-encoding nucleic acid.

[0016] In a preferred embodiment, the mutated PPO-encoding nucleic acid selected in step d) provides at least 2-fold as much tolerance to a PPO-inhibiting herbicide as compared to that provided by the control PPO-encoding nucleic acid.

[0017] The resistance or tolerance can be determined by generating a transgenic plant comprising a nucleic acid sequence of the library of step a) and comparing said transgenic plant with a control plant.

[0018] Another object refers to a method of identifying a plant or algae containing a nucleic acid encoding a mutated PPO which is resistant or tolerant to a PPO-inhibiting herbicide, the method comprising:
[0019] a) identifying an effective amount of a PPO-inhibiting herbicide in a culture of plant cells or green algae.
[0020] b) treating said plant cells or green algae with a mutagenizing agent,
[0021] c) contacting said mutagenized cells population with an effective amount of PPO-inhibiting herbicide, identified in a),
[0022] d) selecting at least one cell surviving these test conditions,
[0023] e) PCR-amplification and sequencing of PPO genes from cells selected in d) and comparing such sequences to wild-type PPO gene sequences, respectively.

[0024] In a preferred embodiment, the mutagenizing agent is ethylmethanesulfonate.

[0025] Another object refers to an isolated and/or recombinant and/or chemically synthesized nucleic acid encoding a mutated PPO polypeptide comprising the sequence of SEQ ID NO: 1, 2, 3, 4, 5, 6, 7, 8, 9, 10, 11, 12, 13, 14, 15, 16, 17, 18, 19, 20, 21, 22, 23, 24, 25, 26, 27, 28, 29, 30, 31, 32, 33, 34, 35, 36, 37, 38, 39, 40, 41, 42, 43, 44, 45, 46, 47, 48, 49, 50, 51, 52, 53, 54, 55, 56, 57, 58, 59, 60, 61, 62, 63, 64, 65, 66, 67, 68, 69, 70, 71, 72, 73, 74, 75, 76, 77, 78, 79, 80, 81, 82, 83, 84, 85, 86, 87, 88, 89, 90, 91, 92, 93, 94, 95, 96, 97, 98, 99, 100, 101, 102, 103, 104, 105, 106, 107, 108, 109, 110, 111, 112, 113, 114, 115, 116, 117, 118, 119, 120, 121, 122, 123, 124, 125, 126, 127, 128, 129, 130, 131, 132, 133, 134, 135, 136, 137, 138, 139, 140, 141, 142, 143, 144, 145, 146, 147, 148, 149, 150, 151, 152, 153, 154, 155, 156, 157, 158, 159, 160, 161, 162, 163, 164, 165, 166, 167, 168, 169, 170, 171, 172, 173, 174, 175, 176, 177, 178, 179, 180, 181, 182, 183, 184, 185, 186, 187, 188, 189, 190, 191, 192, 193, 194, 195, 196, 197, 198, 199, 200, 201, 202, 203, 204, 205, 206, 207, 208, 209, 210, 211, 212, 213, 214, 215, 216, 217, 218, 219, 220, 221, 222, 223, 224, 225, 226, 227, 228, 229, 230, 231, 232, 233, 234, 235, 236, 237, 238, 239, 240, 241, 242, 243, 244, 245, 246, 247, 248, 249, 250, 251, 252, 253, 254, 255, 256, 257, 258, 259, 260, 261, 262, 263, 264, 265, 266, 267, 268, 269, 270, 271, 272, 273, 274, 275, 276, 277, 278, 279, 280, 281, 282, 283, 284, 285, 286, 287, 288, 289, 290, 291, 292, 293, 294, 295, 296, 297, 298, 299, 300, 301, 312, or 313, or a variant, derivative, orthologue, paralogue or homologue thereof, as defined hereinafter.

[0026] Another object refers to a mutated PPO polypeptide, the polypeptide comprising the sequence set forth in SEQ ID NO: 1, 2, 3, 4, 5, 6, 7, 8, 9, 10, 11, 12, 13, 14, 15, 16, 17, 18, 19, 20, 21, 22, 23, 24, 25, 26, 27, 28, 29, 30, 31, 32, 33, 34, 35, 36, 37, 38, 39, 40, 41, 42, 43, 44, 45, 46, 47, 48, 49, 50, 51, 52, 53, 54, 55, 56, 57, 58, 59, 60, 61, 62, 63, 64, 65, 66, 67, 68, 69, 70, 71, 72, 73, 74, 75, 76, 77, 78, 79, 80, 81, 82, 83, 84, 85, 86, 87, 88, 89, 90, 91, 92, 93, 94, 95, 96, 97, 98, 99, 100, 101, 102, 103, 104, 105, 106, 107, 108, 109, 110, 111, 112, 113, 114, 115, 116, 117, 118, 119, 120, 121, 122, 123, 124, 125, 126, 127, 128, 129, 130, 131, 132, 133, 134, 135, 136, 137, 138, 139, 140, 141, 142, 143, 144, 145, 146, 147, 148, 149, 150, 151, 152, 153, 154, 155, 156, 157, 158, 159, 160, 161, 162, 163, 164, 165, 166, 167, 168, 169, 170, 171, 172, 173, 174, 175, 176, 177, 178, 179, 180, 181, 182, 183, 184, 185, 186, 187, 188, 189, 190, 191, 192, 193, 194, 195, 196, 197, 198, 199, 200, 201, 202, 203, 204, 205, 206, 207, 208, 209, 210, 211, 212, 213, 214, 215, 216, 217, 218, 219, 220, 221, 222, 223, 224, 225, 226, 227, 228, 229, 230, 231, 232, 233, 234, 235, 236, 237, 238, 239, 240, 241, 242, 243, 244, 245, 246, 247, 248, 249, 250, 251, 252, 253, 254, 255, 256, 257, 258, 259, 260, 261, 262, 263, 264, 265, 266, 267, 268, 269, 270, 271, 272, 273, 274, 275, 276, 277, 278, 279, 280, 281, 282, 283, 284, 285, 286, 287, 288, 289, 290, 291, 292, 293, 294, 295, 296, 297, 298, 299, 300, 301, 312, or 313, a variant, derivative, orthologue, paralogue or homologue thereof, as defined hereinafter.

[0027] In a preferred embodiment, the nucleic acid being identifiable by a method as defined above.

[0028] In another embodiment, the invention refers to a plant cell transformed by and expressing a wild-type or a mutated PPO nucleic acid according to the present invention or a plant which has been mutated to obtain a plant expressing, preferably over-expressing a wild-type or a mutated PPO nucleic acid according to the present invention, wherein expression of said nucleic acid in the plant cell results in increased resistance or tolerance to a PPO-inhibiting herbicide as compared to a wild type variety of the plant cell.

[0029] In another embodiment, the invention refers to a plant that expresses a mutagenized or recombinant mutated PPO polypeptide, and wherein said mutated PPO confers upon the plant increased herbicide tolerance as compared to the corresponding wild-type variety of the plant when expressed therein.

[0030] In another embodiment, the invention refers to a plant comprising a plant cell according to the present invention, wherein expression of the nucleic acid in the plant results in the plant's increased resistance to PPO-inhibiting herbicide as compared to a wild type variety of the plant.

[0031] The plants of the present invention can be transgenic or non-transgenic.

[0032] Preferably, the expression of the nucleic acid of the invention in the plant results in the plant's increased resistance to PPO-inhibiting herbicides as compared to a wild type variety of the plant.

[0033] In another embodiment, the invention refers to a method for growing the plant according to the present invention while controlling weeds in the vicinity of said plant, said method comprising the steps of:
[0034] a) growing said plant; and
[0035] b) applying a herbicide composition comprising a PPO-inhibiting herbicide to the plant and weeds, wherein the herbicide normally inhibits protoporphyrinogen oxidase, at a level of the herbicide that would inhibit the growth of a corresponding wild-type plant.

[0036] In another embodiment, the invention refers to a seed produced by a transgenic plant comprising a plant cell of the present invention, or to a seed produced by the non-transgenic plant that expresses a mutagenized PPO polypeptide, wherein the seed is true breeding for an increased resistance to a PPO-inhibiting herbicide as compared to a wild type variety of the seed.

[0037] In another embodiment, the invention refers to a method of producing a transgenic plant cell with an increased resistance to a PPO-inhibiting herbicide as compared to a wild type variety of the plant cell comprising, transforming the plant cell with an expression cassette comprising a wild-type or a mutated PPO nucleic acid.

[0038] In another embodiment, the invention refers to a method of producing a transgenic plant comprising, (a) transforming a plant cell with an expression cassette comprising a wild-type or a mutated PPO nucleic acid, and (b) generating a plant with an increased resistance to PPO-inhibiting herbicide from the plant cell.

[0039] Preferably, the expression cassette further comprises a transcription initiation regulatory region and a translation initiation regulatory region that are functional in the plant.

[0040] In another embodiment, the invention relates to using the mutated PPO of the invention as selectable marker. The invention provides a method of identifying or selecting a transformed plant cell, plant tissue, plant or part thereof comprising a) providing a transformed plant cell, plant tissue, plant or part thereof, wherein said transformed plant cell, plant tissue, plant or part thereof comprises an isolated nucleic acid encoding a mutated PPO polypeptide of the invention as described hereinafter, wherein the polypeptide is used as a selection marker, and wherein said transformed plant cell, plant tissue, plant or part thereof may optionally comprise a further isolated nucleic acid of interest; b) contacting the transformed plant cell, plant tissue, plant or part thereof with at least one PPO-inhibiting inhibiting compound; c) determining whether the plant cell, plant tissue, plant or part thereof is affected by the inhibitor or inhibiting compound; and d) identifying or selecting the transformed plant cell, plant tissue, plant or part thereof.

[0041] The invention is also embodied in purified mutated PPO proteins that contain the mutations described herein, which are useful in molecular modeling studies to design further improvements to herbicide tolerance. Methods of protein purification are well known, and can be readily accomplished using commercially available products or specially designed methods, as set forth for example, in Protein Biotechnology, Walsh and Headon (Wiley, 1994).

[0042] In another embodiment, the invention relates to a combination useful for weed control, comprising (a) a polynucleotide encoding a mutated PPO polypeptide according to the present invention, which polynucleotide is capable of being expressed in a plant to thereby provide to that plant tolerance to a PPO inhibiting herbicide; and (b) a PPO inhibiting herbicide.

[0043] In another embodiment, the invention relates to a process for preparing a combination useful for weed control comprising (a) providing a polynucleotide encoding a mutated PPO polypeptide according to the present invention, which polynucleotide is capable of being expressed in a plant to thereby provide to that plant tolerance to a PPO inhibiting herbicide; and (b) providing a PPO inhibiting herbicide.

[0044] In a preferred embodiment, said step of providing a polynucleotide comprises providing a plant containing the polynucleotide.

[0045] In another preferred embodiment, said step of providing a polynucleotide comprises providing a seed containing the polynucleotide.

[0046] In another preferred embodiment, said process further comprises a step of applying the PPO inhibiting herbicide to the seed.

[0047] In another embodiment, the invention relates to the use of a combination useful for weed control, comprising (a) a polynucleotide encoding a mutated PPO polypeptide according to the present invention, which polynucleotide is capable of being expressed in a plant to thereby provide to that plant tolerance to a PPO inhibiting herbicide; and (b) a PPO inhibiting herbicide, to control weeds at a plant cultivation site.

### BRIEF DESCRIPTION OF THE DRAWINGS

[0048] FIGS. 1a and 1b shows amino acid sequence alignments of PPO2 from Amaranthus tuberculatus against various Procaryotic sequences that have PPO and/or PPO-like, and/or PPO associated activity.

[0049] FIG. 2 shows an amino acid sequence alignments of PPO2 from Amaranthus tuberculatus against various Procaryotic sequences that have PPO and/or PPO-like and/or PPO associated activity. Conserved regions are indicated in light grey, grey and black.

[0050] FIGS. 3a, 3b and 3c shows amino acid sequence alignments of PPO2 from Amaranthus tuberculatus against various Procaryotic hemJ sequences that have CopD (Copper resistant protein D) activity and/or PPO and/or PPO-like, and/or PPO associated activity.

[0051] FIGS. 4a and 4b show amino acid sequence alignments of PPO2 from Amaranthus tuberculatus against various Procaryotic hemG sequences that have NADPH (Nicotinamide adenine dinucleotide phosphate)-dependent FMN (Flavinmononukleotid) reductase activity, and/or PPO and/or PPO-like, and/or PPO associated activity.

[0052] FIGS. 5a and 5b show amino acid sequence alignments of PPO2 from Amaranthus tuberculatus against various Procaryotic hemF sequences that have coproporphyrinogen III oxidase activity, and/or PPO and/or PPO-like, and/or PPO associated activity.

### DETAILED DESCRIPTION

[0053] The articles “a” and “an” are used herein to refer to one or more than one (i.e., to at least one) of the grammatical object of the article. By way of example, “an element” means one or more elements.

[0054] As used herein, the word “comprising,” or variations such as “comprises” or “comprising,” will be understood to imply the inclusion of a stated element, integer or step, or group of elements, integers or steps, but not the exclusion of any other element, integer or step, or group of elements, integers or steps.

[0055] The inventors of the present invention have found, that the tolerance or resistance of a plant to a PPO-inhibiting herbicide could be remarkably increased by overexpressing a nucleic acid encoding a mutated PPO polypeptide comprising the sequence set forth in SEQ ID NO: 1, 2, 3, 4, 5, 6, 7, 8, 9, 10, 11, 12, 13, 14, 15, 16, 17, 18, 19, 20, 21, 22, 23, 24, 25, 26, 27, 28, 29, 30, 31, 32, 33, 34, 35, 36, 37, 38, 39, 40, 41, 42, 43, 44, 45, 46, 47, 48, 49, 50, 51, 52, 53, 54, 55, 56, 57, 58, 59, 60, 61, 62, 63, 64, 65, 66, 67, 68, 69, 70, 71, 72, 73, 74, 75, 76, 77, 78, 79, 80, 81, 82, 83, 84, 85, 86, 87, 88, 89, 90, 91, 92, 93, 94, 95, 96, 97, 98, 99, 100, 101, 102, 103, 104, 105, 106, 107, 108, 109, 110, 111, 112, 113, 114, 115, 116, 117, 118, 119, 120, 121, 122, 123, 124, 125, 126, 127, 128, 129, 130, 131, 132, 133, 134, 135, 136, 137, 138, 139, 140, 141, 142, 143, 144, 145, 146, 147, 148, 149, 150, 151, 152, 153, 154, 155, 156, 157, 158, 159, 160, 161, 162, 163, 164, 165, 166, 167, 168, 169, 170, 171, 172, 173, 174, 175, 176, 177, 178, 179, 180, 181, 182, 183, 184, 185, 186, 187, 188, 189, 190, 191, 192, 193, 194, 195, 196, 197, 198, 199, 200, 201, 202, 203, 204, 205, 206, 207, 208, 209, 210, 211, 212, 213, 214, 215, 216, 217, 218, 219, 220, 221, 222, 223, 224, 225, 226, 227, 228, 229, 230, 231, 232, 233, 234, 235, 236, 237, 238, 239, 240, 241, 242, 243, 244, 245, 246, 247, 248, 249, 250, 251, 252, 253, 254, 255, 256, 257, 258, 259, 260, 261, 262, 263, 264, 265, 266, 267, 268, 269, 270, 271, 272, 273, 274, 275, 276, 277, 278, 279, 280, 281, 282, 283, 284, 285, 286, 287, 288, 289, 290, 291, 292, 293, 294, 295, 296, 297, 298, 299, 300, 301, 312, or 313, a variant, derivative, orthologue, paralogue or homologue thereof

[0056] The present invention refers to a method for controlling undesired vegetation at a plant cultivation site, the method comprising the steps of:
[0057] a) providing, at said site, a plant that comprises at least one nucleic acid comprising a nucleotide sequence encoding a wild-type protoporphyrinogen oxidase or a mutated protoporphyrinogen oxidase (mutated PPO) which is resistant or tolerant to a PPO-inhibiting herbicide,
[0058] b) applying to said site an effective amount of said herbicide.

[0059] The term “control of undesired vegetation” is to be understood as meaning the killing of weeds and/or otherwise retarding or inhibiting the normal growth of the weeds. Weeds, in the broadest sense, are understood as meaning all those plants which grow in locations where they are undesired, e.g. (crop) plant cultivation sites. The weeds of the present invention include, for example, dicotyledonous and monocotyledonous weeds. Dicotyledonous weeds include, but are not limited to, weeds of the genera: Sinapis, Lepidium, Galium, Stellaria, Matricaria, Anthemis, Galinsoga, Chenopodium, Urtica, Senecio, Amaranthus, Portulaca, Xanthium, Convolvulus, Ipomoea, Polygonum, Sesbania, Ambrosia, Cirsium, Carduus, Sonchus, Solanum, Rorippa, Rotala, Lindernia, Lamium, Veronica, Abutilon, Emex, Datura, Viola, Galeopsis, Papaver, Centaurea, Trifolium, Ranunculus, and Taraxacum. Monocotyledonous weeds include, but are not limited to, weeds of of the genera: Echinochloa, Setaria, Panicum, Digitaria, Phleum, Poa, Festuca, Eleusine, Brachiaria, Lolium, Bromus, Avena, Cyperus, Sorghum, Agropyron, Cynodon, Monochoria, Fimbristyslis, Sagittaria, Eleocharis, Scirpus, Paspalum, Ischaemum, Sphenoclea, Dactyloctenium, Agrostis, Alopecurus, and Apera. In addition, the weeds of the present invention can include, for example, crop plants that are growing in an undesired location. For example, a volunteer maize plant that is in a field that predominantly comprises soybean plants can be considered a weed, if the maize plant is undesired in the field of soybean plants.

[0060] The term “plant” is used in its broadest sense as it pertains to organic material and is intended to encompass eukaryotic organisms that are members of the Kingdom Plantae, examples of which include but are not limited to vascular plants, vegetables, grains, flowers, trees, herbs, bushes, grasses, vines, ferns, mosses, fungi and algae, etc, as well as clones, offsets, and parts of plants used for asexual propagation (e.g. cuttings, pipings, shoots, rhizomes, underground stems, clumps, crowns, bulbs, corms, tubers, rhizomes, plants/tissues produced in tissue culture, etc.). The term “plant” further encompasses whole plants, ancestors and progeny of the plants and plant parts, including seeds, shoots, stems, leaves, roots (including tubers), flowers, florets, fruits, pedicles, peduncles, stamen, anther, stigma, style, ovary, petal, sepal, carpel, root tip, root cap, root hair, leaf hair, seed hair, pollen grain, microspore, cotyledon, hypocotyl, epicotyl, xylem, phloem, parenchyma, endosperm, a companion cell, a guard cell, and any other known organs, tissues, and cells of a plant, and tissues and organs, wherein each of the aforementioned comprise the gene/nucleic acid of interest. The term “plant” also encompasses plant cells, suspension cultures, callus tissue, embryos, meristematic regions, gametophytes, sporophytes, pollen and microspores, again wherein each of the aforementioned comprises the gene/nucleic acid of interest.

[0061] Plants that are particularly useful in the methods of the invention include all plants which belong to the superfamily Viridiplantae, in particular monocotyledonous and dicotyledonous plants including fodder or forage legumes, ornamental plants, food crops, trees or shrubs selected from the list comprising Acer spp., Actinidia spp., Abelmoschus spp., Agave sisalana, Agropyron spp., Agrostis stolonifera, Allium spp., Amaranthus spp., Ammophila arenaria, Ananas comosus, Annona spp., Apium graveolens, Arachis spp, Artocarpus spp., Asparagus officinalis, Avena spp. (e.g. Avena sativa, Avena fatua, Avena byzantina, Avena fatua var. sativa, Avena hybrida), Averrhoa carambola, Bambusa sp., Benincasa hispida, Bertholletia excelsea, Beta vulgaris, Brassica spp. (e.g. Brassica napus, Brassica rapa ssp. [canola, oilseed rape, turnip rape]), Cadaba farinosa, Camellia sinensis, Canna indica, Cannabis sativa, Capsicum spp., Carex elata, Carica papaya, Carissa macrocarpa, Carya spp., Carthamus tinctorius, Castanea spp., Ceiba pentandra, Cichorium endivia, Cinnamomum spp., Citrullus lanatus, Citrus spp., Cocos spp., Coffea spp., Colocasia esculenta, Cola spp., Corchorus sp., Coriandrum sativum, Corylus spp., Crataegus spp., Crocus sativus, Cucurbita spp., Cucumis spp., Cynara spp., Daucus carota, Desmodium spp., Dimocarpus longan, Dioscorea spp., Diospyros spp., Echinochloa spp., Elaeis (e.g. Elaeis guineensis, Elaeis oleifera), Eleusine coracana, Eragrostis tef, Erianthus sp., Eriobotrya japonica, Eucalyptus sp., Eugenia uniflora, Fagopyrum spp., Fagus spp., Festuca arundinacea, Ficus carica, Fortunella spp., Fragaria spp., Ginkgo biloba, Glycine spp. (e.g. Glycine max, Soja hispida or Soja max), Gossypium hirsutum, Helianthus spp. (e.g. Helianthus annuus), Hemerocallis fulva, Hibiscus spp., Hordeum spp. (e.g. Hordeum vulgare), Ipomoea batatas, Juglans spp., Lactuca sativa, Lathyrus spp., Lens culinaris, Linum usitatissimum, Litchi chinensis, Lotus spp., Luffa acutangula, Lupinus spp., Luzula sylvatica, Lycopersicon spp. (e.g. Lycopersicon esculentum, Lycopersicon lycopersicum, Lycopersicon pyriforme), Macrotyloma spp., Malus spp., Malpighia emarginata, Mammea americana, Mangifera indica, Manihot spp., Manilkara zapota, Medicago sativa, Melilotus spp., Mentha spp., Miscanthus sinensis, Momordica spp., Morus nigra, Musa spp., Nicotiana spp., Olea spp., Opuntia spp., Ornithopus spp., Oryza spp. (e.g. Oryza sativa, Oryza latifolia), Panicum miliaceum, Panicum virgatum, Passiflora edulis, Pastinaca sativa, Pennisetum sp., Persea spp., Petroselinum crispum, Phalaris arundinacea, Phaseolus spp., Phleum pratense, Phoenix spp., Phragmites australis, Physalis spp., Pinus spp., Pistacia vera, Pisum spp., Poa spp., Populus spp., Prosopis spp., Prunus spp., Psidium spp., Punica granatum, Pyrus communis, Quercus spp., Raphanus sativus, Rheum rhabarbarum, Ribes spp., Ricinus communis, Rubus spp., Saccharum spp., Salix sp., Sambucus spp., Secale cereale, Sesamum spp., Sinapis sp., Solanum spp. (e.g. Solanum tuberosum, Solanum integrifolium or Solanum lycopersicum), Sorghum bicolor, Spinacia spp., Syzygium spp., Tagetes spp., Tamarindus indica, Theobroma cacao, Trifolium spp., Tripsacum dactyloides, Triticosecale rimpaui, Triticum spp. (e.g. Triticum aestivum, Triticum durum, Triticum turgidum, Triticum hybernum, Triticum macha, Triticum sativum, Triticum monococcum or Triticum vulgare), Tropaeolum minus, Tropaeolum majus, Vaccinium spp., Vicia spp., Vigna spp., Viola odorata, Vitis spp., Zea mays, Zizania palustris, Ziziphus spp., amaranth, artichoke, asparagus, broccoli, Brussels sprouts, cabbage, canola, carrot, cauliflower, celery, collard greens, flax, kale, lentil, oilseed rape, okra, onion, potato, rice, soybean, strawberry, sugar beet, sugar cane, sunflower, tomato, squash, tea and algae, amongst others. According to a preferred embodiment of the present invention, the plant is a crop plant. Examples of crop plants include inter alia soybean, sunflower, canola, alfalfa, rapeseed, cotton, tomato, potato or tobacco. Further preferably, the plant is a monocotyledonous plant, such as sugarcane. Further preferably, the plant is a cereal, such as rice, maize, wheat, barley, millet, rye, sorghum or oats.

[0062] In a preferred embodiment, the plant has been previously produced by a process comprising recombinantly preparing a plant by introducing and over-expressing a wild-type or mutated PPO transgene according to the present invention, as described in greater detail hereinafter.

[0063] In another preferred embodiment, the plant has been previously produced by a process comprising in situ mutagenizing plant cells, to obtain plant cells which express a mutated PPO.

[0064] As disclosed herein, the nucleic acids of the invention find use in enhancing the herbicide tolerance of plants that comprise in their genomes a gene encoding a herbicide-tolerant wild-type or mutated PPO protein. Such a gene may be an endogenous gene or a transgene, as described hereinafter.

[0065] Therefore, in another embodiment the present invention refers to a method of increasing or enhancing the PPO-inhibitor herbicide tolerance or resistance of a plant, the method comprising overexpressing a nucleic acid encoding a mutated PPO polypeptide comprising the sequence set forth in SEQ ID NO: 1, 2, 3, 4, 5, 6, 7, 8, 9, 10, 11, 12, 13, 14, 15, 16, 17, 18, 19, 20, 21, 22, 23, 24, 25, 26, 27, 28, 29, 30, 31, 32, 33, 34, 35, 36, 37, 38, 39, 40, 41, 42, 43, 44, 45, 46, 47, 48, 49, 50, 51, 52, 53, 54, 55, 56, 57, 58, 59, 60, 61, 62, 63, 64, 65, 66, 67, 68, 69, 70, 71, 72, 73, 74, 75, 76, 77, 78, 79, 80, 81, 82, 83, 84, 85, 86, 87, 88, 89, 90, 91, 92, 93, 94, 95, 96, 97, 98, 99, 100, 101, 102, 103, 104, 105, 106, 107, 108, 109, 110, 111, 112, 113, 114, 115, 116, 117, 118, 119, 120, 121, 122, 123, 124, 125, 126, 127, 128, 129, 130, 131, 132, 133, 134, 135, 136, 137, 138, 139, 140, 141, 142, 143, 144, 145, 146, 147, 148, 149, 150, 151, 152, 153, 154, 155, 156, 157, 158, 159, 160, 161, 162, 163, 164, 165, 166, 167, 168, 169, 170, 171, 172, 173, 174, 175, 176, 177, 178, 179, 180, 181, 182, 183, 184, 185, 186, 187, 188, 189, 190, 191, 192, 193, 194, 195, 196, 197, 198, 199, 200, 201, 202, 203, 204, 205, 206, 207, 208, 209, 210, 211, 212, 213, 214, 215, 216, 217, 218, 219, 220, 221, 222, 223, 224, 225, 226, 227, 228, 229, 230, 231, 232, 233, 234, 235, 236, 237, 238, 239, 240, 241, 242, 243, 244, 245, 246, 247, 248, 249, 250, 251, 252, 253, 254, 255, 256, 257, 258, 259, 260, 261, 262, 263, 264, 265, 266, 267, 268, 269, 270, 271, 272, 273, 274, 275, 276, 277, 278, 279, 280, 281, 282, 283, 284, 285, 286, 287, 288, 289, 290, 291, 292, 293, 294, 295, 296, 297, 298, 299, 300, 301, 312, or 313, a variant, derivative, orthologue, paralogue or homologue thereof.

[0066] Additionally, in certain embodiments, the nucleic acids of the present invention can be stacked with any combination of polynucleotide sequences of interest in order to create plants with a desired phenotype. For example, the nucleic acids of the present invention may be stacked with any other polynucleotides encoding polypeptides having pesticidal and/or insecticidal activity, such as, for example, the Bacillus thuringiensis toxin proteins (described in U.S. Pat. Nos. 5,366,892; 5,747,450; 5,737,514; 5,723,756; 5,593,881; and Geiser et al (1986) Gene 48: 109),

[0067] By way of example, polynucleotides that may be stacked with the nucleic acids of the present invention include nucleic acids encoding polypeptides conferring resistance to pests/pathogens such as viruses, nematodes, insects or fungi, and the like. Exemplary polynucleotides that may be stacked with nucleic acids of the invention include polynucleotides encoding: polypeptides having pesticidal and/or insecticidal activity, such as other Bacillus thuringiensis toxic proteins (described in U.S. Pat. Nos. 5,366,892; 5,747,450; 5,737,514; 5,723,756; 5,593,881; and Geiser et al., (1986) Gene 48:109), lectins (Van Damme et al. (1994) Plant Mol. Biol. 24:825, pentin (described in U.S. Pat. No. 5,981,722), and the like; traits desirable for disease or herbicide resistance (e.g., fumonisin detoxification genes (U.S. Pat. No. 5,792,931); avirulence and disease resistance genes (Jones et al. (1994) Science 266:789; Martin et al., (1993) Science 262:1432; Mindrinos et al. (1994) Cell 78:1089); acetolactate synthase (ALS) mutants that lead to herbicide resistance such as the S4 and/or Hra mutations; glyphosate resistance (e.g., 5-enol-pyrovyl-shikimate-3-phosphate-synthase (EPSPS) gene, described in U.S. Pat. Nos. 4,940,935 and 5,188,642; or the glyphosate N-acetyltransferase (GAT) gene, described in Castle et al. (2004) Science, 304:1151-1154; and in U.S. Patent App. Pub. Nos. 20070004912, 20050246798, and 20050060767)); glufosinate resistance (e.g, phosphinothricin acetyl transferase genes PAT and BAR, described in U.S. Pat. Nos. 5,561,236 and 5,276,268); resistance to herbicides including sulfonyl urea, DHT (2,4D), and PPO herbicides (e.g., glyphosate acetyl transferase, aryloxy alkanoate dioxygenase, acetolactate synthase, and protoporphyrinogen oxidase); a cytochrome P450 or variant thereof that confers herbicide resistance or tolerance to, inter alia, HPPD herbicides (U.S. patent application Ser. No. 12/156,247; U.S. Pat. Nos. 6,380,465; 6,121,512; 5,349,127; 6,649,814; and 6,300,544; and PCT Patent App. Pub. No. WO2007000077); and traits desirable for processing or process products such as high oil (e.g., U.S. Pat. No. 6,232,529); modified oils (e.g., fatty acid desaturase genes (U.S. Pat. No. 5,952,544; WO 94/11516)); modified starches (e.g., ADPG pyrophosphorylases (AGPase), starch synthases (SS), starch branching enzymes (SBE), and starch debranching enzymes (SDBE)); and polymers or bioplastics (e.g., U.S. Pat. No. 5,602,321; beta-ketothiolase, polyhydroxybutyrate synthase, and acetoacetyl-CoA reductase (Schubert et al. (1988) J. Bacteriol. 170:5837-5847) facilitate expression of polyhydroxyalkanoates (PHAs)); the disclosures of which are herein incorporated by reference.

[0068] In a preferred embodiment, the plant comprises at least one additional heterologous nucleic acid comprising a nucleotide sequence encoding a herbicide tolerance enzyme selected, for example, from the group consisting of 5-enolpyruvylshikimate-3-phosphate synthase (EPSPS), Glyphosate acetyl transferase (GAT), cytochrome P450 monooxygenase, phosphinothricin acetyltransferase (PAT), Acetohydroxyacid synthase (AHAS; EC 4.1.3.18, also known as acetolactate synthase or ALS), hydroxyphenyl pyruvate dioxygenase (HPPD), Phytoene desaturase (PD) and dicamba degrading enzymes as disclosed in WO 02/068607, or phenoxyaceticacid- and phenoxypropionicacid-derivative degrading enzymes as disclosed in WO 2008141154 or WO 2005107437. The combinations generated can also include multiple copies of any one of the polynucleotides of interest.

[0069] Generally, the term “herbicide” is used herein to mean an active ingredient that kills, controls or otherwise adversely modifies the growth of plants. The preferred amount or concentration of the herbicide is an “effective amount” or “effective concentration.” By “effective amount” and “effective concentration” is intended an amount and concentration, respectively, that is sufficient to kill or inhibit the growth of a similar, wild-type, plant, plant tissue, plant cell, or host cell, but that said amount does not kill or inhibit as severely the growth of the herbicide-resistant plants, plant tissues, plant cells, and host cells of the present invention. Typically, the effective amount of a herbicide is an amount that is routinely used in agricultural production systems to kill weeds of interest. Such an amount is known to those of ordinary skill in the art. Herbicidal activity is exhibited by herbicides useful for the the present invention when they are applied directly to the plant or to the locus of the plant at any stage of growth or before planting or emergence. The effect observed depends upon the plant species to be controlled, the stage of growth of the plant, the application parameters of dilution and spray drop size, the particle size of solid components, the environmental conditions at the time of use, the specific compound employed, the specific adjuvants and carriers employed, the soil type, and the like, as well as the amount of chemical applied. These and other factors can be adjusted as is known in the art to promote non-selective or selective herbicidal action. Generally, it is preferred to apply the herbicide post emergence to relatively immature undesirable vegetation to achieve the maximum control of weeds.

[0070] By a “herbicide-tolerant” or “herbicide-resistant” plant, it is intended that a plant that is tolerant or resistant to at least one herbicide at a level that would normally kill, or inhibit the growth of, a normal or wild-type plant. By “herbicide-tolerant wildtype or mutated PPO protein” or “herbicide-resistant wildtype or mutated PPO protein”, it is intended that such a PPO protein displays higher PPO activity, relative to the PPO activity of a wild-type PPO protein, when in the presence of at least one herbicide that is known to interfere with PPO activity and at a concentration or level of the herbicide that is known to inhibit the PPO activity of the wild-type mutated PPO protein. Furthermore, the PPO activity of such a herbicide-tolerant or herbicide-resistant mutated PPO protein may be referred to herein as “herbicide-tolerant” or “herbicide-resistant” PPO activity.

[0071] Generally, if the PPO-inhibiting herbicides (also referred to as compounds A) and/or the herbicidal compounds B as described herein, which can be employed in the context of the present invention, are capable of forming geometrical isomers, for example E/Z isomers, it is possible to use both, the pure isomers and mixtures thereof, in the compositions useful for the present the invention. If the PPO-inhibiting herbicides A and/or the herbicidal compounds B as described herein have one or more centers of chirality and, as a consequence, are present as enantiomers or diastereomers, it is possible to use both, the pure enantiomers and diastereomers and their mixtures, in the compositions according to the invention. If the PPO-inhibiting herbicides A and/or the herbicidal compounds B as described herein have ionizable functional groups, they can also be employed in the form of their agriculturally acceptable salts. Suitable are, in general, the salts of those cations and the acid addition salts of those acids whose cations and anions, respectively, have no adverse effect on the activity of the active compounds. Preferred cations are the ions of the alkali metals, preferably of lithium, sodium and potassium, of the alkaline earth metals, preferably of calcium and magnesium, and of the transition metals, preferably of manganese, copper, zinc and iron, further ammonium and substituted ammonium in which one to four hydrogen atoms are replaced by C₁-C₄-alkyl, hydroxy-C₁-C₄-alkyl, C₁-C₄-alkoxy-C₁-C₄-alkyl, hydroxy-C₁-C₄-alkoxy-C₁-C₄-alkyl, phenyl or benzyl, preferably ammonium, methylammonium, isopropylammonium, dimethylammonium, diisopropylammonium, trimethylammonium, heptylammonium, dodecylammonium, tetradecylammonium, tetramethylammonium, tetraethylammonium, tetrabutylammonium, 2-hydroxyethylammonium (olamine salt), 2-(2-hydroxyeth-1-oxy)eth-1-ylammonium (diglycolamine salt), di(2-hydroxyeth-1-yl)ammonium (diolamine salt), tris(2-hydroxyethyl)ammonium (trolamine salt), tris(2-hydroxypropyl)ammonium, benzyltrimethylammonium, benzyltriethylammonium, N,N,N-trimethylethanolammonium (choline salt), furthermore phosphonium ions, sulfonium ions, preferably tri(C₁-C₄-alkyl)sulfonium, such as trimethylsulfonium, and sulfoxonium ions, preferably tri(C₁-C₄-alkyl)sulfoxonium, and finally the salts of polybasic amines such as N,N-bis-(3-aminopropyl)methylamine and diethylenetriamine. Anions of useful acid addition salts are primarily chloride, bromide, fluoride, iodide, hydrogensulfate, methylsulfate, sulfate, dihydrogenphosphate, hydrogenphosphate, nitrate, bicarbonate, carbonate, hexafluorosilicate, hexafluorophosphate, benzoate and also the anions of C₁-C₄-alkanoic acids, preferably formate, acetate, propionate and butyrate.

[0072] The PPO-inhibiting herbicides A and/or the herbicidal compounds B as described herein having a carboxyl group can be employed in the form of the acid, in the form of an agriculturally suitable salt as mentioned above or else in the form of an agriculturally acceptable derivative, for example as amides, such as mono- and di-C₁-C₆-alkylamides or arylamides, as esters, for example as allyl esters, propargyl esters, C₁-C₁₀-alkyl esters, alkoxyalkyl esters, tefuryl ((tetrahydrofuran-2-yl)methyl) esters and also as thioesters, for example as C₁-C₁₀-alkylthio esters. Preferred mono- and di-C₁-C₆-alkylamides are the methyl and the dimethylamides.

[0073] Preferred arylamides are, for example, the anilides and the 2-chloroanilides. Preferred alkyl esters are, for example, the methyl, ethyl, propyl, isopropyl, butyl, isobutyl, pentyl, mexyl (1-methylhexyl), meptyl (1-methylheptyl), heptyl, octyl or isooctyl (2-ethylhexyl) esters. Preferred C₁-C₄-alkoxy-C₁-C₄-alkyl esters are the straight-chain or branched C₁-C₄-alkoxy ethyl esters, for example the 2-methoxyethyl, 2-ethoxyethyl, 2-butoxyethyl (butotyl), 2-butoxypropyl or 3-butoxypropyl ester. An example of a straight-chain or branched C₁-C₁₀-alkylthio ester is the ethylthio ester.

[0074] Examples of PPO inhibiting herbicides which can be used according to the present invention are acifluorfen, acifluorfen-sodium, aclonifen, azafenidin, bencarbazone, benzfendizone, bifenox, butafenacil, carfentrazone, carfentrazone-ethyl, chlomethoxyfen, cinidon-ethyl, fluazolate, flufenpyr, flufenpyr-ethyl, flumiclorac, flumiclorac-pentyl, flumioxazin, fluoroglycofen, fluoroglycofen-ethyl, fluthiacet, fluthiacet-methyl, fomesafen, halosafen, lactofen, oxadiargyl, oxadiazon, oxyfluorfen, pentoxazone, profluazol, pyraclonil, pyraflufen, pyraflufen-ethyl, saflufenacil, sulfentrazone, thidiazimin, tiafenacil, chlornitrofen, flumipropyn, fluoronitrofen, flupropacil, furyloxyfen, nitrofluorfen, ethyl [3-[2-chloro-4-fluoro-5-(1-methyl-6-trifluoromethyl-2,4-dioxo-1,2,3,4-tetrahydropyrimidin-3-yl)phenoxy]-2-pyridyloxy]acetate (CAS 353292-31-6; S-3100), N-ethyl-3-2,6-dichloro-4-trifluoromethylphenoxy)-5-methyl-1H-pyrazole-1-carboxamide (CAS 452098-92-9), N-tetrahydrofurfuryl-3-(2,6-dichloro-4-trifluoromethylphenoxy)-5-methyl-1H-pyrazole-1-carboxamide (CAS 915396-43-9), N-ethyl-3-(2-chloro-6-fluoro-4-trifluoromethyl-phenoxy)-5-methyl-1H-pyrazole-1-carboxamide (CAS 452099-05-7), N-tetrahydrofurfuryl-3-(2-chloro-6-fluoro-4-trifluoromethylphenoxy)-5-methyl-1H-pyrazole-1-carboxamide (CAS 452100-03-7), 3-[7-fluoro-3-oxo-4-(prop-2-ynyl)-3,4-dihydro-2H-benzo[1,4]oxazin-6-yl]-1,5-dimethyl-6-thioxo-[1,3,5]triazinan-2,4-dione (CAS 451484-50-7), 1,5-dimethyl-6-thioxo-3-(2,2,7-trifluoro-3-oxo-4-(prop-2-ynyl)-3,4-dihydro-2H-benzo[b][1,4]oxazin-6-yl)-1,3,5-triazinane-2,4-dione (CAS 1258836-72-4), 2-(2,2,7-Trifluoro-3-oxo-4-prop-2-ynyl-3,4-dihydro-2H-benzo[1,4]oxazin-6-yl)-4,5,6,7-tetrahydro-isoindole-1,3-dione (CAS 1300118-96-0), 1-Methyl-6-trifluoromethyl-3-(2,2,7-trifluoro-3-oxo-4-prop-2-ynyl-3,4-dihydro-2H-benzo[1,4]oxazin-6-yl)-1H-pyrimidine-2,4-dione, methyl (E)-4-[2-chloro-5-[4-chloro-5-(difluoromethoxy)-1H-methyl-pyrazol-3-yl]-4-fluoro-phenoxy]-3-methoxy-but-2-enoate [CAS 948893-00-3], 3-[7-Chloro-5-fluoro-2-(trifluoromethyl)-1H-benzimidazol-4-yl]-1-methyl-6-(trifluoromethyl)-1H-pyrimidine-2,4-dione (CAS 212754-02-4), and

[0075] uracils of formula III

[chemical structure]

[0076] wherein
[0077] R³⁰ and R³¹ independently of one another are F, Cl or CN;
[0078] R³² is O or S;
[0079] R³³ is H, F, Cl, CH₃ or OCH₃;
[0080] R³⁴ is CH or N;
[0081] R³⁵ is O or S;
[0082] R³⁶ is H, CN, CH₃, CF₃, OCH₃, OC₂H₅, SCH₃, SC₂H₅, (CO)OC₂H₅ or CH₂R³⁸,
   [0083] wherein R³⁸ is F, Cl, OCH₃, SCH₃, SC₂H₅, CH₂F, CH₂Br or CH₂OH;
[0084] and
[0085] R³⁷ is (C₁-C₆-alkyl)amino, (C₁-C₆-dialkyl)amino, (NH)OR³⁹, OH, OR⁴⁰ or SR⁴⁰
   [0086] wherein R³⁹ is CH₃, C₂H₅ or phenyl; and
      [0087] R⁴⁰ is independently of one another C₁-C₆-alkyl, C₂-C₆-alkenyl, C₃-C₆-alkynyl, C₁-C₆-haloalkyl, C₁-C₆-alkoxy-C₁-C₆-alkyl, C₁-C₆-alkoxy-C₁-C₆-alkoxy-C₁-C₆-alkyl, C₂-C₆-cyanoalkyl, C₁-C₄-alkoxy-carbonyl-C₁-C₄-alkyl, C₁-C₄-alkyl-carbonyl-amino, C₁-C₆-alkylsulfinyl-C₁-C₆-alkyl, C₁-C₆-alkyl-sulfonyl-C₁-C₆-alkyl, C₁-C₆-dialkoxy-C₁-C₆-alkyl, C₁-C₆-alkyl-carbonyloxy-C₁-C₆-alkyl, phenyl-carbonyl-C₁-C₆-alkyl, tri(C₁-C₃-alkyl)-silyl-C₁-C₆-alkyl, tri(C₁-C₃-alkyl)-silyl-C₁-C₆-alkenyl, tri(C₁-C₃-alkyl)-silyl-C₁-C₆-alkynyl, tri(C₁-C₃-alkyl)silyl-C₁-C₆-alkoxy-C₁-C₆-alkyl, dimethylamino, tetrahydropyranyl, tetrahydrofuranyl-C₁-C₃-alkyl, phenyl-C₁-C₆-alkoxy-C₁-C₆-alkyl, phenyl-C₁-C₃-alkyl, pyridyl-C₁-C₃-alkyl, pyridyl, phenyl,
         [0088] which pyridyls and phenyls independently of one another are substituted by one to five substituents selected from the group consisting of halogen, C₁-C₃-alkyl or C₁-C₂-haloalkyl;
      [0089] C₃-C₆-cycloalkyl or C₃-C₆-cycloalkyl-C₁-C₄-alkyl, which cycloalkyls independently of one another are unsubstituted or substituted by one to five substituents selected from the group consisting of halogen, C₁-C₃-alkyl and C₁-C₂-haloalkyl;
[0090] including their agriculturally acceptable alkali metal salts or ammonium salts.

[0091] Preferred PPO-inhibiting herbicides that can be used according to the present invention are: Acifluorfen, acifluorfen-sodium, azafenidin, bencarbazone, benzfendizone, butafenacil, carfentrazone-ethyl, cinidon-ethyl, flufenpyr-ethyl, flumiclorac-pentyl, flumioxazin, fluoroglycofen-ethyl, fluthiacet-methyl, fomesafen, lactofen, oxadiargyl, oxadiazon, oxyfluorfen, pentoxazone, pyraflufen-ethyl, saflufenacil, sulfentrazone, ethyl [3-[2-chloro-4-fluoro-5-(1-methyl-6-trifluoromethyl-2,4-dioxo-1,2,3,4-tetrahydropyrimidin-3-yl)phenoxy]-2-pyridyloxy]-acetate (CAS 353292-31-6; S-3100), N-ethyl-3-(2,6-dichloro-4-trifluoromethylphenoxy)-5-methyl-1H-pyrazole-1-carboxamide (CAS 452098-92-9), N-tetrahydrofurfuryl-3-(2,6-dichloro-4-trifluoromethylphenoxy)-5-methyl-1H-pyrazole-1-carboxamide (CAS 915396-43-9), N-ethyl-3-(2-chloro-6-fluoro-4-trifluoromethylphenoxy)-5-methyl-1H-pyrazole-1-carboxamide (CAS 452099-05-7), N-tetrahydrofurfuryl-3-(2-chloro-6-fluoro-4-trifluoromethylphenoxy)-5-methyl-1H-pyrazole-1-carboxamide (CAS 452100-03-7), 3-[7-fluoro-3-oxo-4-(prop-2-ynyl)-3,4-dihydro-2H-benzo[1,4]oxazin-6-yl]-1,5-dimethyl-6-thioxo-[1,3,5]triazinan-2,4-dione (CAS 451484-50-7), 1,5-dimethyl-6-thioxo-3-(2,2,7-trifluoro-3-oxo-4-(prop-2-ynyl)-3,4-dihydro-2H-benzo[b][1,4]oxazin-6-yl)-1,3,5-triazinane-2,4-dione (CAS 1258836-72-4), 2-(2,2,7-Trifluoro-3-oxo-4-prop-2-ynyl-3,4-dihydro-2H-benzo[1,4]oxazin-6-yl)-4,5,6,7-tetrahydro-isoindole-1,3-dione (CAS 1300118-96-0); 1-Methyl-6-trifluoromethyl-3-(2,2,7-trifluoro-3-oxo-4-prop-2-ynyl-3,4-dihydro-2H-benzo[1,4]oxazin-6-yl)-1H-pyrimidine-2,4-dione (CAS 1304113-05-0), 3-[7-Chloro-5-fluoro-2-(trifluoromethyl)-1H-benzimidazol-4-yl]-1-methyl-6-(trifluoromethyl)-1H-pyrimidine-2,4-dione (CAS 212754-02-4)

[0092] uracils of formula III.1 (corresponding to uracils of formula III, wherein R³⁰ is F, R³¹ is Cl, R³² is O; R³³ is H; R³⁴ is CH; R³⁵ is O and R³⁷ is OR⁴⁰)

[chemical structure]

[0093] wherein
[0094] R³⁶ is OCH₃, OC₂H₅, SCH₃ or SC₂H₅;
[0095] and
[0096] R⁴⁰ is C₁-C₆-alkyl, C₂-C₆-alkenyl, C₃-C₆-alkynyl, C₁-C₆-haloalkyl, C₁-C₆-alkoxy-C₁-C₆-alkyl, C₁-C₆-alkoxy-C₁-C₆-alkoxy-C₁-C₆-alkyl, C₁-C₃-cyanoalkyl, phenyl-C₁-C₃-alkyl, pyridyl-C₁-C₃-alkyl, C₃-C₆-cycloalkyl or C₃-C₆-cycloalkyl-C₁-C₄-alkyl,
   [0097] which cycloalkyls are unsubstituted or substituted by one to five substituents selected from the group consisting of halogen, C₁-C₃-alkyl and C₁-C₂-haloalkyl;

[0098] and

[0099] uracils of formula III.2 (corresponding to uracils of formula III, wherein R³⁰ is F; R³¹ is Cl; R³² is O; R³³ is H; R³⁴ is N; R³⁵ is O and R³⁷ is OR⁴⁰ with R⁴⁰ is C₁-C₆-alkyl)

[chemical structure]

[0100] Particularly preferred PPO-inhibiting herbicides that can be used according to the present invention are:

[0101] acifluorfen, acifluorfen-sodium, butafenacil, carfentrazone-ethyl, cinidon-ethyl, flumioxazin, fluthiacet-methyl, fomesafen, lactofen, oxadiargyl, oxyfluorfen, saflufenacil, sulfentrazone, ethyl [3-[2-chloro-4-fluoro-5-(1-methyl-6-trifluoromethyl-2,4-dioxo-1,2,3,4-tetrahydropyrimidin-3-yl)-phenoxy]-2-pyridyloxy]acetate (CAS 353292-31-6; S-3100), 3-[7-fluoro-3-oxo-4-(prop-2-ynyl)-3,4-dihydro-2H-benzo[1,4]oxazin-6-yl]-1,5-dimethyl-6-thioxo-[1,3,5]triazinan-2,4-dione (CAS 451484-50-7), 1,5-dimethyl-6-thioxo-3-(2,2,7-trifluoro-3-oxo-4-(prop-2-ynyl)-3,4-dihydro-2H-benzo[b][1,4]oxazin-6-yl)-1,3,5-triazinane-2,4-dione (CAS 1258836-72-4), and 2-(2,2,7-Trifluoro-3-oxo-4-prop-2-ynyl-3,4-dihydro-2H-benzo[1,4]oxazin-6-yl)-4,5,6,7-tetrahydro-isoindole-1,3-dione (CAS 1300118-96-0), 1-Methyl-6-trifluoromethyl-3-(2,2,7-trifluoro-3-oxo-4-prop-2-ynyl-3,4-dihydro-2H-benzo[1,4]oxazin-6-yl)-1H-pyrimidine-2,4-dione (CAS 1304113-05-0), uracils of formula III.1.1 (corresponding to uracils of formula III, wherein R³⁰ is F, R³¹ is Cl, R³² is O; R³³ is H; R³⁴ is CH; R³⁵ is O, R³⁶ is OCH₃ and R³⁷ is OR⁴⁰)

[chemical structure]

[0102] wherein
[0103] R⁴⁰ is C₁-C₆-alkyl, C₂-C₆-alkenyl, C₃-C₆-alkynyl, C₁-C₆-haloalkyl, C₁-C₆-alkoxy-C₁-C₆-alkyl, C₁-C₆-alkoxy-C₁-C₆-alkoxy-C₁-C₆-alkyl, C₁-C₃-cyanoalkyl, phenyl-C₁-C₃-alkyl, pyridyl-C₁-C₃-alkyl, C₃-C₆-cycloalkyl or C₃-C₆-cycloalkyl-C₁-C₄-alkyl,
   [0104] which cycloalkyls are unsubstituted or substituted by one to five substituents selected from the group consisting of halogen, C₁-C₃-alkyl and C₁-C₂-haloalkyl;
[0105] is preferably CH₃, CH₂CH₂OC₂H₅, CH₂CHF₂, cyclohexyl, (1-methylcyclopropyl)methyl or CH₂(pyridine-4-yl);

[0106] uracils of formula III.2.1 (corresponding to uracils of formula III, wherein R³⁰ is F; R³¹ is Cl; R³² is O; R³³ is H; R³⁴ is N; R³⁵ is O and R³⁷ is OR⁴⁰ with R⁴⁰ is CH₃)

[chemical structure]

[0107] and

[0108] uracils of formula III.2.2 (corresponding to uracils of formula III, wherein R³⁰ is F; R³¹ is Cl; R³² is O; R³³ is H; R³⁴ is N; R³⁵ is O and R³⁷ is OR⁴⁰ with R⁴⁰ is C₂H₅)

[chemical structure]

[0109] Especially preferred PPO-inhibiting herbicides are the PPO-inhibiting herbicides.1 to A.14 listed below in table A:

TABLE A

| | |
|---|---|
| A.1 | acifluorfen |
| A.2 | butafenacil |
| A.3 | carfentrazone-ethyl |
| A.4 | cinidon-ethyl |
| A.5 | flumioxazin |
| A.6 | fluthiacet-methyl |
| A.7 | fomesafen |
| A.8 | lactofen |
| A.9 | oxadiargyl |
| A.10 | oxyfluorfen |
| A.11 | saflufenacil |
| A.12 | sulfentrazone |
| A.13 | ethyl [3-[2-chloro-4-fluoro-5-(1-methyl-6-trifluoromethyl-2,4- |
| | dioxo-1,2,3,4-tetra-hydropyrimidin-3-yl)phenoxy]-2- |
| | pyridyloxy]acetate (CAS 353292-31-6) |
| A.14 | 1,5-dimethyl-6-thioxo-3-(2,2,7-trifluoro-3-oxo-4-(prop-2-ynyl)-3,4- |
| | dihydro-2H-benzo[b][1,4]oxazin-6-yl)-1,3,5-triazinane-2,4-dione |
| | (CAS 1258836-72-4) |

[0110] The PPO-inhibiting herbicides described above that are useful to carry out the present invention are often best applied in conjunction with one or more other herbicides to obtain control of a wider variety of undesirable vegetation. For example, PPO-inhibiting herbicides may further be used in conjunction with additional herbicides to which the crop plant is naturally tolerant, or to which it is resistant via expression of one or more additional transgenes as mentioned supra, or to which it is resistant via mutagenesis and breeding methods as described hereinafter. When used in conjunction with other targeting herbicides, the PPO-inhibiting herbicides, to which the plant of the present invention had been made resistant or tolerant, can be formulated with the other herbicide or herbicides, tank mixed with the other herbicide or herbicides, or applied sequentially with the other herbicide or herbicides.

[0111] Suitable components for mixtures are, for example, selected from the herbicides of class b1) to b15)

[0112] B) herbicides of class b1) to b15):
[0113] b1) Lipid Biosynthesis Inhibitors;
[0114] b2) acetolactate synthase inhibitors (ALS inhibitors);
[0115] b3) photosynthesis inhibitors;
[0116] b4) protoporphyrinogen-IX oxidase inhibitors,
[0117] b5) bleacher herbicides;
[0118] b6) enolpyruvyl shikimate 3-phosphate synthase inhibitors (EPSP inhibitors);
[0119] b7) glutamine synthetase inhibitors;
[0120] b8) 7,8-dihydropteroate synthase inhibitors (DHP inhibitors);
[0121] b9) mitosis inhibitors;
[0122] b10) inhibitors of the synthesis of very long chain fatty acids (VLCFA inhibitors);
[0123] b11) cellulose biosynthesis inhibitors;
[0124] b12) decoupler herbicides;
[0125] b13) auxinic herbicides;
[0126] b14) auxin transport inhibitors; and
[0127] b15) other herbicides selected from the group consisting of bromobutide, chlorflurenol, chlorflurenol-methyl, cinmethylin, cumyluron, dalapon, dazomet, difenzoquat, difenzoquat-metilsulfate, dimethipin, DSMA, dymron, endothal and its salts, etobenzanid, flamprop, flamprop-isopropyl, flamprop-methyl, flamprop-M-isopropyl, flamprop-M-methyl, flurenol, flurenol-butyl, flurprimidol, fosamine, fosamine-ammonium, indanofan, indaziflam, maleic hydrazide, mefluidide, metam, methiozolin (CAS 403640-27-7), methyl azide, methyl bromide, methyl-dymron, methyl iodide, MSMA, oleic acid, oxaziclomefone, pelargonic acid, pyributicarb, quinoclamine, triaziflam, tridiphane and 6-chloro-3-(2-cyclopropyl-6-methylphenoxy)-4-pyridazinol (CAS 499223-49-3) and its salts and esters;

[0128] including their agriculturally acceptable salts or derivatives.

[0129] Examples of herbicides B which can be used in combination with the PPO-inhibiting herbicides according to the present invention are:

[0130] b1) from the group of the lipid biosynthesis inhibitors:

[0131] ACC-herbicides such as alloxydim, alloxydim-sodium, butroxydim, clethodim, clodinafop, clodinafop-propargyl, cycloxydim, cyhalofop, cyhalofop-butyl, diclofop, diclofop-methyl, fenoxaprop, fenoxaprop-ethyl, fenoxaprop-P, fenoxaprop-P-ethyl, fluazifop, fluazifop-butyl, fluazifop-P, fluazifop-P-butyl, haloxyfop, haloxyfop-methyl, haloxyfop-P, haloxyfop-P-methyl, metamifop, pinoxaden, profoxydim, propaquizafop, quizalofop, quizalofop-ethyl, quizalofop-tefuryl, quizalofop-P, quizalofop-P-ethyl, quizalofop-P-tefuryl, sethoxydim, tepraloxydim, tralkoxydim,

[0132] 4-(4′-Chloro-4-cyclopropyl-2′-fluoro[1,1′-biphenyl]-3-yl)-5-hydroxy-2,2,6,6-tetramethyl-2H-pyran-3(6H)-one (CAS 1312337-72-6); 4-(2′,4′-Dichloro-4-cyclopropyl[1,1′-biphenyl]-3-yl)-5-hydroxy-2,2,6,6-tetramethyl-2H-pyran-3(6H)-one (CAS 1312337-45-3); 4-(4′-Chloro-4-ethyl-2′-fluoro[1,1′-biphenyl]-3-yl)-5-hydroxy-2,2,6,6-tetramethyl-2H-pyran-3(6H)-one (CAS 1033757-93-5); 4-(2′,4′-Dichloro-4-ethyl[1,1′-biphenyl]-3-yl)-2,2,6,6-tetramethyl-2H-pyran-3,5(4H,6H)-dione (CAS 1312340-84-3); 5-(Acetyloxy)-4-(4′-chloro-4-cyclopropyl-2′-fluoro[1,1′-biphenyl]-3-yl)-3,6-dihydro-2,2,6,6-tetramethyl-2H-pyran-3-one (CAS 1312337-48-6); 5-(Acetyloxy)-4-(2′,4′-dichloro-4-cyclopropyl-[1,1′-biphenyl]-3-yl)-3,6-dihydro-2,2,6,6-tetramethyl-2H-pyran-3-one; 5-(Acetyloxy)-4-(4′-chloro-4-ethyl-2′-fluoro[1,1′-biphenyl]-3-yl)-3,6-dihydro-2,2,6,6-tetramethyl-2H-pyran-3-one (CAS 1312340-82-1); 5-(Acetyloxy)-4-(2′,4′-dichloro-4-ethyl[1,1′-biphenyl]-3-yl)-3,6-dihydro-2,2,6,6-tetramethyl-2H-pyran-3-one (CAS 1033760-55-2); 4-(4′-Chloro-4-cyclopropyl-2′-fluoro[1,1′-biphenyl]-3-yl)-5,6-dihydro-2,2,6,6-tetramethyl-5-oxo-2H-pyran-3-yl carbonic acid methyl ester (CAS 1312337-51-1); 4-(2′,4′-Dichloro-4-cyclopropyl-[1,1′-biphenyl]-3-yl)-5,6-dihydro-2,2,6,6-tetramethyl-5-oxo-2H-pyran-3-ylcarbonic acid methyl ester; 4-(4′-Chloro-4-ethyl-2′-fluoro[1,1′-biphenyl]-3-yl)-5,6-dihydro-2,2,6,6-tetramethyl-5-oxo-2H-pyran-3-ylcarbonic acid methyl ester (CAS 1312340-83-2); 4-(2′,4′-Dichloro-4-ethyl[1,1′-biphenyl]-3-yl)-5,6-dihydro-2,2,6,6-tetramethyl-5-oxo-2H-pyran-3-ylcarbonic acid methyl ester (CAS 1033760-58-5); and non ACC herbicides such as benfuresate, butylate, cycloate, dalapon, dimepiperate, EPTC, esprocarb, ethofumesate, flupropanate, molinate, orbencarb, pebulate, prosulfocarb, TCA, thiobencarb, tiocarbazil, triallate and vernolate;

[0133] b2) from the group of the ALS inhibitors:

[0134] sulfonylureas such as amidosulfuron, azimsulfuron, bensulfuron, bensulfuron-methyl, chlorimuron, chlorimuron-ethyl, chlorsulfuron, cinosulfuron, cyclosulfamuron, ethametsulfuron, ethametsulfuron-methyl, ethoxysulfuron, flazasulfuron, flucetosulfuron, flupyrsulfuron, flupyrsulfuron-methyl-sodium, foramsulfuron, halosulfuron, halosulfuron-methyl, imazosulfuron, iodosulfuron, iodosulfuron-methyl-sodium, iofensulfuron, iofensulfuron-sodium, mesosulfuron, metazosulfuron, metsulfuron, metsulfuron-methyl, nicosulfuron, orthosulfamuron, oxasulfuron, primisulfuron, primisulfuron-methyl, propyrisulfuron, prosulfuron, pyrazosulfuron, pyrazosulfuron-ethyl, rimsulfuron, sulfometuron, sulfometuron-methyl, sulfosulfuron, thifensulfuron, thifensulfuron-methyl, triasulfuron, tribenuron, tribenuron-methyl, trifloxysulfuron, triflusulfuron, triflusulfuron-methyl and tritosulfuron,

[0135] imidazolinones such as imazamethabenz, imazamethabenz-methyl, imazamox, imazapic, imazapyr, imazaquin and imazethapyr, triazolopyrimidine herbicides and sulfonanilides such as cloransulam, cloransulam-methyl, diclosulam, flumetsulam, florasulam, metosulam, penoxsulam, pyrimisulfan and pyroxsulam,

[0136] pyrimidinylbenzoates such as bispyribac, bispyribac-sodium, pyribenzoxim, pyriftalid, pyriminobac, pyriminobac-methyl, pyrithiobac, pyrithiobac-sodium, 4-[[[2-[(4,6-dimethoxy-2-pyrimidinyl)oxy]phenyl]methyl]amino]-benzoic acid-1-methylethyl ester (CAS 420138-41-6), 4-[[[2-[(4,6-dimethoxy-2-pyrimidinyl)oxy]phenyl]methyl]amino]-benzoic acid propyl ester (CAS 420138-40-5), N-(4-bromophenyl)-2-[(4,6-dimethoxy-2-pyrimidinyl)oxy]benzenemethanamine (CAS 420138-01-8),

[0137] sulfonylaminocarbonyl-triazolinone herbicides such as flucarbazone, flucarbazone-sodium, propoxycarbazone, propoxycarbazone-sodium, thiencarbazone and thiencarbazone-methyl; and triafamone;

[0138] among these, a preferred embodiment of the invention relates to those compositions comprising at least one imidazolinone herbicide;

[0139] b3) From the group of the photosynthesis inhibitors:

[0140] amicarbazone, inhibitors of the photosystem II, e.g. triazine herbicides, including of chlorotriazine, triazinones, triazindiones, methylthiotriazines and pyridazinones such as ametryn, atrazine, chloridazone, cyanazine, desmetryn, dimethametryn,hexazinone, metribuzin, prometon, prometryn, propazine, simazine, simetryn, terbumeton, terbuthylazin, terbutryn and trietazin, aryl urea such as chlorobromuron, chlorotoluron, chloroxuron, dimefuron, diuron, fluometuron, isoproturon, isouron, linuron, metamitron, methabenzthiazuron, metobenzuron, metoxuron, monolinuron, neburon, siduron, tebuthiuron and thiadiazuron, phenyl carbamates such as desmedipham, karbutilat, phenmedipham, phenmedipham-ethyl, nitrile herbicides such as bromofenoxim, bromoxynil and its salts and esters, ioxynil and its salts and esters, uraciles such as bromacil, lenacil and terbacil, and bentazon and bentazon-sodium, pyridate, pyridafol, pentanochlor and propanil and inhibitors of the photosystem I such as diquat, diquat-dibromide, paraquat, paraquat-dichloride and paraquat-dimetilsulfate. Among these, a preferred embodiment of the invention relates to those compositions comprising at least one aryl urea herbicide. Among these, likewise a preferred embodiment of the invention relates to those compositions comprising at least one triazine herbicide. Among these, likewise a preferred embodiment of the invention relates to those compositions comprising at least one nitrile herbicide;

[0141] b4) from the group of the protoporphyrinogen-IX oxidase inhibitors:

[0142] acifluorfen, acifluorfen-sodium, azafenidin, bencarbazone, benzfendizone, bifenox, butafenacil, carfentrazone, carfentrazone-ethyl, chlomethoxyfen, cinidon-ethyl, fluazolate, flufenpyr, flufenpyr-ethyl, flumiclorac, flumiclorac-pentyl, flumioxazin, fluoroglycofen, fluoroglycofen-ethyl, fluthiacet, fluthiacet-methyl, fomesafen, halosafen, lactofen, oxadiargyl, oxadiazon, oxyfluorfen, pentoxazone, profluazol, pyraclonil, pyraflufen, pyraflufen-ethyl, saflufenacil, sulfentrazone, thidiazimin, tiafenacil, ethyl [3-[2-chloro-4-fluoro-5-(1-methyl-6-trifluoromethyl-2,4-dioxo-1,2,3,4-tetrahydropyrimidin-3-yl)phenoxy]-2-pyridyloxy]acetate (CAS 353292-31-6; S-3100, N-ethyl-3-(2,6-dichloro-4-trifluoromethylphenoxy)-5-methyl-1H-pyrazole-1-carboxamide (CAS 452098-92-9), N-tetrahydrofurfuryl-3-(2,6-dichloro-4-trifluoromethylphenoxy)-5-methyl-1H-pyrazole-1-carboxamide (CAS 915396-43-9), N-ethyl-3-(2-chloro-6-fluoro-4-trifluoromethylphenoxy)-5-methyl-1H-pyrazole-1-carboxamide (CAS 452099-05-7), N-tetrahydrofurfuryl-3-(2-chloro-6-fluoro-4-trifluoromethylphenoxy)-5-methyl-1H-pyrazole-1-carboxamide (CAS 452100-03-7), 3-[7-fluoro-3-oxo-4-(prop-2-ynyl)-3,4-dihydro-2H-benzo[1,4]oxazin-6-yl]-1,5-dimethyl-6-thioxo-[1,3,5]triazinan-2,4-dione, 1,5-dimethyl-6-thioxo-3-(2,2,7-trifluoro-3-oxo-4-(prop-2-ynyl)-3,4-dihydro-2H-benzo[b][1,4]oxazin-6-yl)-1,3,5-triazinane-2,4-dione (CAS 1258836-72-4), 2-(2,2,7-Trifluoro-3-oxo-4-prop-2-ynyl-3,4-dihydro-2H-benzo[1,4]oxazin-6-yl)-4,5,6,7-tetrahydro-isoindole-1,3-dione, 1-Methyl-6-trifluoromethyl-3-(2,2,7-trifluoro-3-oxo-4-prop-2-ynyl-3,4-dihydro-2H-benzo[1,4]oxazin-6-yl)-1H-pyrimidine-2,4-dione (CAS 1304113-05-0), methyl (E)-4-[2-chloro-5-[4-chloro-5-(difluoromethoxy)-1H-methyl-pyrazol-3-yl]-4-fluoro-phenoxy]-3-methoxy-but-2-enoate [CAS 948893-00-3], and 3-[7-Chloro-5-fluoro-2-(trifluoromethyl)-1H-benzimidazol-4-yl]-1-methyl-6-(trifluoromethyl)-1H-pyrimidine-2,4-dione (CAS 212754-02-4);

[0143] b5) from the group of the bleacher herbicides:

[0144] PDS inhibitors: beflubutamid, diflufenican, fluridone, flurochloridone, flurtamone, norflurazon, picolinafen, and 4-(3-trifluoromethylphenoxy)-2-(4-trifluoromethylphenyl)pyrimidine (CAS 180608-33-7), HPPD inhibitors: benzobicyclon, benzofenap, clomazone, isoxaflutole, mesotrione, pyrasulfotole, pyrazolynate, pyrazoxyfen, sulcotrione, tefuryltrione, tembotrione, topramezone and bicyclopyrone, bleacher, unknown target: aclonifen, amitrole and flumeturon;

[0145] b6) from the group of the EPSP synthase inhibitors:

[0146] glyphosate, glyphosate-isopropylammonium, glyposate-potassium and glyphosate-trimesium (sulfosate);

[0147] b7) from the group of the glutamine synthase inhibitors:

[0148] bilanaphos (bialaphos), bilanaphos-sodium, glufosinate, glufosinate-P and glufosinate-ammonium;

[0149] b8) from the group of the DHP synthase inhibitors:

[0150] asulam;

[0151] b9) from the group of the mitosis inhibitors:

[0152] compounds of group K1: dinitroanilines such as benfluralin, butralin, dinitramine, ethalfluralin, fluchloralin, oryzalin, pendimethalin, prodiamine and trifluralin, phosphoramidates such as amiprophos, amiprophos-methyl, and butamiphos, benzoic acid herbicides such as chlorthal, chlorthal-dimethyl, pyridines such as dithiopyr and thiazopyr, benzamides such as propyzamide and tebutam; compounds of group K2: chlorpropham, propham and carbetamide, among these, compounds of group K1, in particular dinitroanilines are preferred;

[0153] b10) from the group of the VLCFA inhibitors:

[0154] chloroacetamides such as acetochlor, alachlor, butachlor, dimethachlor, dimethenamid, dimethenamid-P, metazachlor, metolachlor, metolachlor-S, pethoxamid, pretilachlor, propachlor, propisochlor and thenylchlor, oxyacetanilides such as flufenacet and mefenacet, acetanilides such as diphenamid, naproanilide and napropamide, tetrazolinones such fentrazamide, and other herbicides such as anilofos, cafenstrole, fenoxasulfone, ipfencarbazone, piperophos, pyroxasulfone and isoxazoline compounds of the formulae II.1, II.2, II.3, II.4, II.5, II.6, II.7, II.8 and II.9

[chemical structure]

[chemical structure]

[0155] the isoxazoline compounds of the formula (I)I are known in the art, e.g. from WO 2006/024820, WO 2006/037945, WO 2007/071900 and WO 2007/096576;

[0156] among the VLCFA inhibitors, preference is given to chloroacetamides and oxyacetamides;

[0157] b11) from the group of the cellulose biosynthesis inhibitors:

[0158] chlorthiamid, dichlobenil, flupoxam, indaziflam, triaziflam, isoxaben and 1-Cyclohexyl-5-pentafluorphenyloxy-1⁴-[1,2,4,6]thiatriazin-3-ylamine;

[0159] b12) from the group of the decoupler herbicides:

[0160] dinoseb, dinoterb and DNOC and its salts;

[0161] b13) from the group of the auxinic herbicides:

[0162] 2,4-D and its salts and esters such as clacyfos, 2,4-DB and its salts and esters, aminocyclopyrachlor and its salts and esters, aminopyralid and its salts such as aminopyralid-tris(2-hydroxypropyl)ammonium and its esters, benazolin, benazolin-ethyl, chloramben and its salts and esters, clomeprop, clopyralid and its salts and esters, dicamba and its salts and esters, dichlorprop and its salts and esters, dichlorprop-P and its salts and esters, fluroxypyr, fluroxypyr-butometyl, fluroxypyr-meptyl, halauxifen and its salts and esters (CAS 943832-60-8); MCPA and its salts and esters, MCPA-thioethyl, MCPB and its salts and esters, mecoprop and its salts and esters, mecoprop-P and its salts and esters, picloram and its salts and esters, quinclorac, quinmerac, TBA (2,3,6) and its salts and esters and triclopyr and its salts and esters;

[0163] b14) from the group of the auxin transport inhibitors: diflufenzopyr, diflufenzopyr-sodium, naptalam and naptalam-sodium;

[0164] b15) from the group of the other herbicides: bromobutide, chlorflurenol, chlorflurenol-methyl, cinmethylin, cumyluron, cyclopyrimorate (CAS 499223-49-3) and its salts and esters, dalapon, dazomet, difenzoquat, difenzoquat-metilsulfate, dimethipin, DSMA, dymron, endothal and its salts, etobenzanid, flamprop, flamprop-isopropyl, flamprop-methyl, flamprop-M-isopropyl, flamprop-M-methyl, flurenol, flurenol-butyl, flurprimidol, fosamine, fosamine-ammonium, indanofan, indaziflam, maleic hydrazide, mefluidide, metam, methiozolin (CAS 403640-27-7), methyl azide, methyl bromide, methyl-dymron, methyl iodide, MSMA, oleic acid, oxaziclomefone, pelargonic acid, pyributicarb, quinoclamine, triaziflam and tridiphane.

[0165] Preferred herbicides B that can be used in combination with the PPO-inhibiting herbicides according to the present invention are:

[0166] b1) from the group of the lipid biosynthesis inhibitors:

[0167] clethodim, clodinafop-propargyl, cycloxydim, cyhalofop-butyl, diclofop-methyl, fenoxaprop-P-ethyl, fluazifop-P-butyl, haloxyfop-P-methyl, metamifop, pinoxaden, profoxydim, propaquizafop, quizalofop-P-ethyl, quizalofop-P-tefuryl, sethoxydim, tepraloxydim, tralkoxydim, 4-(4′-Chloro-4-cyclopropyl-2′-fluoro[1,1′-biphenyl]-3-yl)-5-hydroxy-2,2,6,6-tetramethyl-2H-pyran-3(6H)-one (CAS 1312337-72-6); 4-(2′,4′-Dichloro-4-cyclopropyl[1,1′-biphenyl]-3-yl)-5-hydroxy-2,2,6,6-tetramethyl-2H-pyran-3(6H)-one (CAS 1312337-45-3); 4-(4′-Chloro-4-ethyl-2′-fluoro[1,1′-biphenyl]-3-yl)-5-hydroxy-2,2,6,6-tetramethyl-2H-pyran-3(6H)-one (CAS 1033757-93-5); 4-(2′,4′-Dichloro-4-ethyl[1,1′-biphenyl]-3-yl)-2,2,6,6-tetramethyl-2H-pyran-3,5(4H,6H)-dione (CAS 1312340-84-3); 5-(Acetyloxy)-4-(4′-chloro-4-cyclopropyl-2′-fluoro[1,1′-biphenyl]-3-yl)-3,6-dihydro-2,2,6,6-tetramethyl-2H-pyran-3-one (CAS 1312337-48-6); 5-(Acetyloxy)-4-(2′,4′-dichloro-4-cyclopropyl-[1,1′-biphenyl]-3-yl)-3,6-dihydro-2,2,6,6-tetramethyl-2H-pyran-3-one; 5-(Acetyloxy)-4-(4′-chloro-4-ethyl-2′-fluoro[1,1′-biphenyl]-3-yl)-3,6-dihydro-2,2,6,6-tetramethyl-2H-pyran-3-one (CAS 1312340-82-1); 5-(Acetyloxy)-4-(2′,4′-dichloro-4-ethyl[1,1′-biphenyl]-3-yl)-3,6-dihydro-2,2,6,6-tetramethyl-2H-pyran-3-one (CAS 1033760-55-2); 4-(4′-Chloro-4-cyclopropyl-2′-fluoro[1,1′-biphenyl]-3-yl)-5,6-dihydro-2,2,6,6-tetramethyl-5-oxo-2H-pyran-3-ylcarbonic acid methyl ester (CAS 1312337-51-1); 4-(2′,4′-Dichloro-4-cyclopropyl-[1,1′-biphenyl]-3-yl)-5,6-dihydro-2,2,6,6-tetramethyl-5-oxo-2H-pyran-3-ylcarbonic acid methyl ester; 4-(4′-Chloro-4-ethyl-2′-fluoro[1,1′-biphenyl]-3-yl)-5,6-dihydro-2,2,6,6-tetramethyl-5-oxo-2H-pyran-3-ylcarbonic acid methyl ester (CAS 1312340-83-2); 4-(2′,4′-Dichloro-4-ethyl[1,1′-biphenyl]-3-yl)-5,6-dihydro-2,2,6,6-tetramethyl-5-oxo-2H-pyran-3-ylcarbonic acid methyl ester (CAS 1033760-58-5); benfuresate, dimepiperate, EPTC, esprocarb, ethofumesate, molinate, orbencarb, prosulfocarb, thiobencarb and triallate;

[0168] b2) from the group of the ALS inhibitors:

[0169] amidosulfuron, azimsulfuron, bensulfuron-methyl, bispyribac-sodium, chlorimuron-ethyl, chlorsulfuron, cloransulam-methyl, cyclosulfamuron, diclosulam, ethametsulfuron-methyl, ethoxysulfuron, flazasulfuron, florasulam, flucarbazone-sodium, flucetosulfuron, flumetsulam, flupyrsulfuron-methyl-sodium, foramsulfuron, halosulfuron-methyl, imazamethabenz-methyl, imazamox, imazapic, imazapyr, imazaquin, imazethapyr, imazosulfuron, iodosulfuron, iodosulfuron-methyl-sodium, iofensulfuron, iofensulfuron-sodium, mesosulfuron, metazosulfuron, metosulam, metsulfuron-methyl, nicosulfuron, orthosulfamuron, oxasulfuron, penoxsulam, primisulfuron-methyl, propoxycarbazon-sodium, propyrisulfuron, prosulfuron, pyrazosulfuron-ethyl, pyribenzoxim, pyrimisulfan, pyriftalid, pyriminobac-methyl, pyrithiobac-sodium, pyroxsulam, rimsulfuron, sulfometuron-methyl, sulfosulfuron, thiencarbazone-methyl, thifensulfuron-methyl, triasulfuron, tribenuron-methyl, trifloxysulfuron, triflusulfuron-methyl, tritosulfuron and triafamone;

[0170] b3) from the group of the photosynthesis inhibitors:

[0171] ametryn, amicarbazone, atrazine, bentazone, bentazone-sodium, bromoxynil and its salts and esters, chloridazone, chlorotoluron, cyanazine, desmedipham, diquat-dibromide, diuron, fluometuron, hexazinone, ioxynil and its salts and esters, isoproturon, lenacil, linuron, metamitron, methabenzthiazuron, metribuzin, paraquat, paraquat-dichloride, phenmedipham, propanil, pyridate, simazine, terbutryn, terbuthylazine and thidiazuron;

[0172] b4) from the group of the protoporphyrinogen-IX oxidase inhibitors:

[0173] acifluorfen, acifluorfen-sodium, azafenidin, bencarbazone, benzfendizone, butafenacil, carfentrazone-ethyl, cinidon-ethyl, flufenpyr-ethyl, flumiclorac-pentyl, flumioxazin, fluoroglycofen-ethyl, fluthiacet-methyl, fomesafen, lactofen, oxadiargyl, oxadiazon, oxyfluorfen, pentoxazone, pyraflufen-ethyl, saflufenacil, sulfentrazone, ethyl [3-[2-chloro-4-fluoro-5-(1-methyl-6-trifluoromethyl-2,4-dioxo-1,2,3,4-tetrahydropyrimidin-3-yl)phenoxy]-2-pyridyloxy]-acetate (CAS 353292-31-6; S-3100), N-ethyl-3-(2,6-dichloro-4-trifluoromethylphenoxy)-5-methyl-1H-pyrazole-1-carboxamide (CAS 452098-92-9), N-tetrahydrofurfuryl-3-(2,6-dichloro-4-trifluoromethylphenoxy)-5-methyl-1H-pyrazole-1-carboxamide (CAS 915396-43-9), N-ethyl-3-(2-chloro-6-fluoro-4-trifluoromethylphenoxy)-5-methyl-1H-pyrazole-1-carboxamide (CAS 452099-05-7), N-tetrahydrofurfuryl-3-(2-chloro-6-fluoro-4-trifluoromethylphenoxy)-5-methyl-1H-pyrazole-1-carboxamide (CAS 452100-03-7), 3-[7-fluoro-3-oxo-4-(prop-2-ynyl)-3,4-dihydro-2H-benzo[1,4]oxazin-6-yl]-1,5-dimethyl-6-thioxo-[1,3,5]triazinan-2,4-dione, 1,5-dimethyl-6-thioxo-3-(2,2,7-trifluoro-3-oxo-4-(prop-2-ynyl)-3,4-dihydro-2H-benzo[b][1,4]oxazin-6-yl)-1,3,5-triazinane-2,4-dione (CAS 1258836-72-4), 2-(2,2,7-Trifluoro-3-oxo-4-prop-2-ynyl-3,4-dihydro-2H-benzo[1,4]oxazin-6-yl)-4,5,6,7-tetrahydro-isoindole-1,3-dione; 1-Methyl-6-trifluoromethyl-3-(2,2,7-trifluoro-3-oxo-4-prop-2-ynyl-3,4-dihydro-2H-benzo[1,4]oxazin-6-yl)-1H-pyrimidine-2,4-dione, and 3-[7-Chloro-5-fluoro-2-(trifluoromethyl)-1H-benzimidazol-4-yl]-1-methyl-6-(trifluoromethyl)-1H-pyrimidine-2,4-dione (CAS 212754-02-4);

[0174] b5) from the group of the bleacher herbicides:

[0175] aclonifen, beflubutamid, benzobicyclon, clomazone, diflufenican, flurochloridone, flurtamone, isoxaflutole, mesotrione, norflurazon, picolinafen, pyrasulfotole, pyrazolynate, sulcotrione, tefuryltrione, tembotrione, topramezone, bicyclopyrone, 4-(3-trifluoromethylphenoxy)-2-(4-trifluoromethylphenyl)pyrimidine (CAS 180608-33-7), amitrole and flumeturon;

[0176] b6) from the group of the EPSP synthase inhibitors:

[0177] glyphosate, glyphosate-isopropylammonium, glyphosate-potassium and glyphosate-trimesium (sulfosate);

[0178] b7) from the group of the glutamine synthase inhibitors:

[0179] glufosinate, glufosinate-P, glufosinate-ammonium;

[0180] b8) from the group of the DHP synthase inhibitors: asulam;

[0181] b9) from the group of the mitosis inhibitors:

[0182] benfluralin, dithiopyr, ethalfluralin, oryzalin, pendimethalin, thiazopyr and trifluralin;

[0183] b10) from the group of the VLCFA inhibitors:

[0184] acetochlor, alachlor, anilofos, butachlor, cafenstrole, dimethenamid, dimethenamid-P, fentrazamide, flufenacet, mefenacet, metazachlor, metolachlor, S-metolachlor, naproanilide, napropamide, pretilachlor, fenoxasulfone, ipfencarbazone, pyroxasulfone thenylchlor and isoxazoline-compounds of the formulae II.1, II.2, II.3, II.4, II.5, II.6, II.7, II.8 and II.9 as mentioned above;

[0185] b11) from the group of the cellulose biosynthesis inhibitors: dichlobenil, flupoxam, isoxaben and 1-Cyclohexyl-5-pentafluorphenyloxy-1⁴-[1,2,4,6]thiatriazin-3-ylamine;

[0186] b13) from the group of the auxinic herbicides:

[0187] 2,4-D and its salts and esters, aminocyclopyrachlor and its salts and esters, aminopyralid and its salts such as aminopyralid-tris(2-hydroxypropyl)ammonium and its esters, clopyralid and its salts and esters, dicamba and its salts and esters, dichlorprop-P and its salts and esters, fluroxypyr-meptyl, halauxifen and its salts and esters (CAS 943832-60-8), MCPA and its salts and esters, MCPB and its salts and esters, mecoprop-P and its salts and esters, picloram and its salts and esters, quinclorac, quinmerac and triclopyr and its salts and esters;

[0188] b14) from the group of the auxin transport inhibitors: diflufenzopyr and diflufenzopyr-sodium;

[0189] b15) from the group of the other herbicides: bromobutide, cinmethylin, cumyluron, cyclopyrimorate (CAS 499223-49-3) and its salts and esters, dalapon, difenzoquat, difenzoquat-metilsulfate, DSMA, dymron (=daimuron), flamprop, flamprop-isopropyl, flamprop-methyl, flamprop-M-isopropyl, flamprop-M-methyl, indanofan, indaziflam, metam, methylbromide, MSMA, oxaziclomefone, pyributicarb, triaziflam and tridiphane.

[0190] Particularly preferred herbicides B that can be used in combination with the PPO-inhibiting herbicides according to the present invention are:

[0191] b1) from the group of the lipid biosynthesis inhibitors: clodinafop-propargyl, cycloxydim, cyhalofop-butyl, fenoxaprop-P-ethyl, pinoxaden, profoxydim, tepraloxydim, tralkoxydim, 4-(4′-Chloro-4-cyclopropyl-2′-fluoro[1,1′-biphenyl]-3-yl)-5-hydroxy-2,2,6,6-tetramethyl-2H-pyran-3(6H)-one (CAS 1312337-72-6); 4-(2′,4′-Dichloro-4-cyclopropyl[1,1′-biphenyl]-3-yl)-5-hydroxy-2,2,6,6-tetramethyl-2H-pyran-3(6H)-one (CAS 1312337-45-3); 4-(4′-Chloro-4-ethyl-2′-fluoro[1,1′-biphenyl]-3-yl)-5-hydroxy-2,2,6,6-tetramethyl-2H-pyran-3(6H)-one (CAS 1033757-93-5); 4-(2′,4′-Dichloro-4-ethyl[1,1′-biphenyl]-3-yl)-2,2,6,6-tetramethyl-2H-pyran-3,5(4H,6H)-dione (CAS 1312340-84-3); 5-(Acetyloxy)-4-(4′-chloro-4-cyclopropyl-2′-fluoro[1,1′-biphenyl]-3-yl)-3,6-dihydro-2,2,6,6-tetramethyl-2H-pyran-3-one (CAS 1312337-48-6); 5-(Acetyloxy)-4-(2′,4′-dichloro-4-cyclopropyl-[1,1′-biphenyl]-3-yl)-3,6-dihydro-2,2,6,6-tetramethyl-2H-pyran-3-one; 5-(Acetyloxy)-4-(4′-chloro-4-ethyl-2′-fluoro[1,1′-biphenyl]-3-yl)-3,6-dihydro-2,2,6,6-tetramethyl-2H-pyran-3-one (CAS 1312340-82-1); 5-(Acetyloxy)-4-(2′,4′-dichloro-4-ethyl[1,1′-biphenyl]-3-yl)-3,6-dihydro-2,2,6,6-tetramethyl-2H-pyran-3-one (CAS 1033760-55-2); 4-(4′-Chloro-4-cyclopropyl-2′-fluoro[1,1′-biphenyl]-3-yl)-5,6-dihydro-2,2,6,6-tetramethyl-5-oxo-2H-pyran-3-yl carbonic acid methyl ester (CAS 1312337-51-1); 4-(2′,4′-Dichloro-4-cyclopropyl-[1,1′-biphenyl]-3-yl)-5,6-dihydro-2,2,6,6-tetramethyl-5-oxo-2H-pyran-3-yl carbonic acid methyl ester; 4-(4′-Chloro-4-ethyl-2′-fluoro[1,1′-biphenyl]-3-yl)-5,6-dihydro-2,2,6,6-tetramethyl-5-oxo-2H-pyran-3-yl carbonic acid methyl ester (CAS 1312340-83-2); 4-(2′,4′-Dichloro-4-ethyl[1,1′-biphenyl]-3-yl)-5,6-dihydro-2,2,6,6-tetramethyl-5-oxo-2H-pyran-3-ylcarbonic acid methyl ester (CAS 1033760-58-5); esprocarb, prosulfocarb, thiobencarb and triallate;

[0192] b2) from the group of the ALS inhibitors: bensulfuron-methyl, bispyribac-sodium, cyclosulfamuron, diclosulam, flumetsulam, flupyrsulfuron-methyl-sodium, foramsulfuron, imazamox, imazapic, imazapyr, imazaquin, imazethapyr, imazosulfuron, iodosulfuron, iodosulfuron-methyl-sodium, iofensulfuron, iofensulfuron-sodium, mesosulfuron, metazosulfuron, nicosulfuron, penoxsulam, propoxycarbazon-sodium, propyrisulfuron, pyrazosulfuron-ethyl, pyroxsulam, rimsulfuron, sulfosulfuron, thiencarbazon-methyl, tritosulfuron and triafamone;

[0193] b3) from the group of the photosynthesis inhibitors: ametryn, atrazine, diuron, fluometuron, hexazinone, isoproturon, linuron, metribuzin, paraquat, paraquat-dichloride, propanil, terbutryn and terbuthylazine;

[0194] b4) from the group of the protoporphyrinogen-IX oxidase inhibitors: acifluorfen, acifluorfen-sodium, butafenacil, cinidon-ethyl, carfentrazone-ethyl, flumioxazin, fluthiacet-methyl, fomesafen, lactofen, oxadiargyl, oxyfluorfen, saflufenacil, sulfentrazone, ethyl [3-[2-chloro-4-fluoro-5-(1-methyl-6-trifluoromethyl-2,4-dioxo-1,2,3,4-tetrahydropyrimidin-3-yl)phenoxy]-2-pyridyloxy]acetate (CAS 353292-31-6; S-3100), 3-[7-fluoro-3-oxo-4-(prop-2-ynyl)-3,4-dihydro-2H-benzo[1,4]oxazin-6-yl]-1,5-dimethyl-6-thioxo-[1,3,5]triazinan-2,4-dione, 1,5-dimethyl-6-thioxo-3-(2,2,7-trifluoro-3-oxo-4-(prop-2-ynyl)-3,4-dihydro-2H-benzo[b][1,4]oxazin-6-yl)-1,3,5-triazinane-2,4-dione (CAS 1258836-72-4), and 2-(2,2,7-Trifluoro-3-oxo-4-prop-2-ynyl-3,4-dihydro-2H-benzo[1,4]oxazin-6-yl)-4,5,6,7-tetrahydro-isoindole-1,3-dione, and 1-Methyl-6-trifluoromethyl-3-(2,2,7-trifluoro-3-oxo-4-prop-2-ynyl-3,4-dihydro-2H-benzo[1,4]oxazin-6-yl)-1H-pyrimidine-2,4-dione;

[0195] b5) from the group of the bleacher herbicides: clomazone, diflufenican, flurochloridone, isoxaflutole, mesotrione, picolinafen, sulcotrione, tefuryltrione, tembotrione, topramezone, bicyclopyrone, amitrole and flumeturon;

[0196] b6) from the group of the EPSP synthase inhibitors: glyphosate, glyphosate-isopropylammonium and glyphosate-trimesium (sulfosate);

[0197] b7) from the group of the glutamine synthase inhibitors: glufosinate, glufosinate-P and glufosinate-ammonium;

[0198] b9) from the group of the mitosis inhibitors: pendimethalin and trifluralin;

[0199] b10) from the group of the VLCFA inhibitors: acetochlor, cafenstrole, dimethenamid-P, fentrazamide, flufenacet, mefenacet, metazachlor, metolachlor, S-metolachlor, fenoxasulfone, ipfencarbazone and pyroxasulfone; likewise, preference is given to isoxazoline compounds of the formulae II.1, II.2, II.3, II.4, II.5, II.6, II.7, II.8 and II.9 as mentioned above;

[0200] b11) from the group of the cellulose biosynthesis inhibitors: isoxaben;

[0201] b13) from the group of the auxinic herbicides: 2,4-D and its salts and esters such as clacyfos, and aminocyclopyrachlor and its salts and esters, aminopyralid and its salts and its esters, clopyralid and its salts and esters, dicamba and its salts and esters, fluroxypyr-meptyl, quinclorac and quinmerac;

[0202] b14) from the group of the auxin transport inhibitors: diflufenzopyr and diflufenzopyr-sodium,

[0203] b15) from the group of the other herbicides: dymron (=daimuron), indanofan, indaziflam, oxaziclomefone and triaziflam.

[0204] Moreover, it may be useful to apply the PPO-inhibiting herbicides, when used in combination with a compound B described SUPRA, in combination with safeners. Safeners are chemical compounds which prevent or reduce damage on useful plants without having a major impact on the herbicidal action of herbicides towards unwanted plants. They can be applied either before sowings (e.g. on seed treatments, shoots or seedlings) or in the pre-emergence application or post-emergence application of the useful plant.

[0205] Furthermore, the safeners C, the PPO-inhibiting herbicides and/or the herbicides B can be applied simultaneously or in succession.

[0206] Suitable safeners are e.g. (quinolin-8-oxy)acetic acids, 1-phenyl-5-haloalkyl-1H-1,2,4-triazol-3-carboxylic acids, 1-phenyl-4,5-dihydro-5-alkyl-1H-pyrazol-3,5-dicarboxylic acids, 4,5-dihydro-5,5-diaryl-3-isoxazol carboxylic acids, dichloroacetamides, alpha-oximinophenylacetonitriles, acetophenonoximes, 4,6-dihalo-2-phenylpyrimidines, N-[[4-(aminocarbonyl)phenyl]sulfonyl]-2-benzoic amides, 1,8-naphthalic anhydride, 2-halo-4-(haloalkyl)-5-thiazol carboxylic acids, phosphorthiolates and N-alkyl-O-phenylcarbamates and their agriculturally acceptable salts and their agriculturally acceptable derivatives such amides, esters, and thioesters, provided they have an acid group.

[0207] Examples of preferred safeners C are benoxacor, cloquintocet, cyometrinil, cyprosulfamide, dichlormid, dicyclonon, dietholate, fenchlorazole, fenclorim, flurazole, fluxofenim, furilazole, isoxadifen, mefenpyr, mephenate, naphthalic anhydride, oxabetrinil, 4-(dichloroacetyl)-1-oxa-4-azaspiro[4.5]decane (MON4660, CAS 71526-07-3) and 2,2,5-trimethyl-3-(dichloroacetyl)-1,3-oxazolidine (R-29148, CAS 52836-31-4).

[0208] Especially preferred safeners C are benoxacor, cloquintocet, cyprosulfamide, dichlormid, fenchlorazole, fenclorim, flurazole, fluxofenim, furilazole, isoxadifen, mefenpyr, naphthalic anhydride, oxabetrinil, 4-(dichloroacetyl)-1-oxa-4-azaspiro[4.5]decane (MON4660, CAS 71526-07-3) and 2,2,5-trimethyl-3-(dichloroacetyl)-1,3-oxazolidine (R-29148, CAS 52836-31-4).

[0209] Particularly preferred safeners C are benoxacor, cloquintocet, cyprosulfamide, dichlormid, fenchlorazole, fenclorim, furilazole, isoxadifen, mefenpyr, naphtalic anhydride, 4-(dichloroacetyl)-1-oxa-4-azaspiro[4.5]decane (MON4660, CAS 71526-07-3), and 2,2,5-trimethyl-3-(dichloroacetyl)-1,3-oxazolidine (R-29148, CAS 52836-31-4).

[0210] Also preferred safeners C are benoxacor, cloquintocet, cyprosulfamide, dichlormid, fenchlorazole, fenclorim, furilazole, isoxadifen, mefenpyr, 4-(dichloroacetyl)-1-oxa-4-azaspiro-[4.5]decane (MON4660, CAS 71526-07-3) and 2,2,5-trimethyl-3-(dichloroacetyl)-1,3-oxazolidine (R-29148, CAS 52836-31-4).

[0211] Particularly preferred safeners C, which, as component C, are constituent of the composition according to the invention are the safeners C as defined above; in particular the safeners C.1-C.12 listed below in table C:

TABLE C

| | Safener C |
|---|---|
| C.1 | benoxacor |
| C.2 | cloquintocet |
| C.3 | cyprosulfamide |
| C.4 | dichlormid |
| C.5 | fenchlorazole |
| C.6 | fenclorim |
| C.7 | furilazole |
| C.8 | isoxadifen |
| C.9 | mefenpyr |
| C.10 | naphtalic acid anhydride |
| C.11 | 4-(dichloroacetyl)-1-oxa-4-azaspiro[4.5]decane |
| | (MON4660, CAS 71526-07-3) |
| C.12 | 2,2,5-trimethyl-3-(dichloro-acetyl)-1,3-oxazolidine |
| | (R-29148, CAS 52836-31-4) |

[0212] The PPO-inhibiting herbicides (compounds A) and the active compounds B of groups b1) to b15) and the active compounds C are known herbicides and safeners, see, for example, The Compendium of Pesticide Common Names (http://www.alanwood.net/pesticides/); Farm Chemicals Handbook 2000 volume 86, Meister Publishing Company, 2000; B. Hock, C. Fedtke, R. R. Schmidt, Herbizide [Herbicides], Georg Thieme Verlag, Stuttgart 1995; W. H. Ahrens, Herbicide Handbook, 7th edition, Weed Science Society of America, 1994; and K. K. Hatzios, Herbicide Handbook, Supplement for the 7th edition, Weed Science Society of America, 1998. 2,2,5-Trimethyl-3-(dichloroacetyl)-1,3-oxazolidine [CAS No. 52836-31-4] is also referred to as R-29148. 4-(Dichloroacetyl)-1-oxa-4-azaspiro[4.5]decane [CAS No. 71526-07-3] is also referred to as AD-67 and MON 4660.

[0213] The assignment of the active compounds to the respective mechanisms of action is based on current knowledge. If several mechanisms of action apply to one active compound, this substance was only assigned to one mechanism of action.

[0214] Active compounds B and C having a carboxyl group can be employed in the form of the acid, in the form of an agriculturally suitable salt as mentioned above or else in the form of an agriculturally acceptable derivative in the compositions according to the invention.

[0215] In the case of dicamba, suitable salts include those, where the counterion is an agriculturally acceptable cation. For example, suitable salts of dicamba are dicamba-sodium, dicamba-potassium, dicamba-methylammonium, dicamba-dimethylammonium, dicamba-isopropylammonium, dicamba-diglycolamine, dicamba-olamine, dicamba-diolamine, dicamba-trolamine, dicamba-N,N-bis-(3-aminopropyl)methylamine and dicamba-diethylenetriamine. Examples of a suitable ester are dicamba-methyl and dicamba-butotyl.

[0216] Suitable salts of 2,4-D are 2,4-D-ammonium, 2,4-D-dimethylammonium, 2,4-D-diethylammonium, 2,4-D-diethanolammonium (2,4-D-diolamine), 2,4-D-triethanolammonium, 2,4-D-isopropylammonium, 2,4-D-triisopropanolammonium, 2,4-D-heptylammonium, 2,4-D-dodecylammonium, 2,4-D-tetradecylammonium, 2,4-D-triethylammonium, 2,4-D-tris(2-hydroxypropyl)ammonium, 2,4-D-tris(isopropyl)ammonium, 2,4-D-trolamine, 2,4-D-lithium, 2,4-D-sodium. Examples of suitable esters of 2,4-D are 2,4-D-butotyl, 2,4-D-2-butoxypropyl, 2,4-D-3-butoxypropyl, 2,4-D-butyl, 2,4-D-ethyl, 2,4-D-ethylhexyl, 2,4-D-isobutyl, 2,4-D-isooctyl, 2,4-D-isopropyl, 2,4-D-meptyl, 2,4-D-methyl, 2,4-D-octyl, 2,4-D-pentyl, 2,4-D-propyl, 2,4-D-tefuryl and clacyfos.

[0217] Suitable salts of 2,4-DB are for example 2,4-DB-sodium, 2,4-DB-potassium and 2,4-DB-dimethylammonium. Suitable esters of 2,4-DB are for example 2,4-DB-butyl and 2,4-DB-isoctyl. Suitable salts of dichlorprop are for example dichlorprop-sodium, dichlorprop-potassium and dichlorprop-dimethylammonium. Examples of suitable esters of dichlorprop are dichlorprop-butotyl and dichlorprop-isoctyl.

[0218] Suitable salts and esters of MCPA include MCPA-butotyl, MCPA-butyl, MCPA-dimethyl-ammonium, MCPA-diolamine, MCPA-ethyl, MCPA-thioethyl, MCPA-2-ethylhexyl, MCPA-isobutyl, MCPA-isoctyl, MCPA-isopropyl, MCPA-isopropylammonium, MCPA-methyl, MCPA-olamine, MCPA-potassium, MCPA-sodium and MCPA-trolamine.

[0219] A suitable salt of MCPB is MCPB sodium. A suitable ester of MCPB is MCPB-ethyl.

[0220] Suitable salts of clopyralid are clopyralid-potassium, clopyralid-olamine and clopyralid-tris-(2-hydroxypropyl)ammonium. Example of suitable esters of clopyralid is clopyralid-methyl. Examples of a suitable ester of fluroxypyr are fluroxypyr-meptyl and fluroxypyr-2-butoxy-1-methylethyl, wherein fluroxypyr-meptyl is preferred.

[0221] Suitable salts of picloram are picloram-dimethylammonium, picloram-potassium, picloram-triisopropanolammonium, picloram-triisopropylammonium and picloram-trolamine. A suitable ester of picloram is picloram-isoctyl.

[0222] A suitable salt of triclopyr is triclopyr-triethylammonium. Suitable esters of triclopyr are for example triclopyr-ethyl and triclopyr-butotyl.

[0223] Suitable salts and esters of chloramben include chloramben-ammonium, chloramben-diolamine, chloramben-methyl, chloramben-methylammonium and chloramben-sodium. Suitable salts and esters of 2,3,6-TBA include 2,3,6-TBA-dimethylammonium, 2,3,6-TBA-lithium, 2,3,6-TBA-potassium and 2,3,6-TBA-sodium.

[0224] Suitable salts and esters of aminopyralid include aminopyralid-potassium and aminopyralid-tris(2-hydroxypropyl)ammonium.

[0225] Suitable salts of glyphosate are for example glyphosate-ammonium, glyphosate-diammonium, glyphoste-dimethylammonium, glyphosate-isopropylammonium, glyphosate-potassium, glyphosate-sodium, glyphosate-trimesium as well as the ethanolamine and diethanolamine salts, preferably glyphosate-diammonium, glyphosate-isopropylammonium and glyphosate-trimesium (sulfosate).

[0226] A suitable salt of glufosinate is for example glufosinate-ammonium.

[0227] A suitable salt of glufosinate-P is for example glufosinate-P-ammonium.

[0228] Suitable salts and esters of bromoxynil are for example bromoxynil-butyrate, bromoxynil-heptanoate, bromoxynil-octanoate, bromoxynil-potassium and bromoxynil-sodium.

[0229] Suitable salts and esters of ioxonil are for example ioxonil-octanoate, ioxonil-potassium and ioxonil-sodium.

[0230] Suitable salts and esters of mecoprop include mecoprop-butotyl, mecoprop-dimethylammonium, mecoprop-diolamine, mecoprop-ethadyl, mecoprop-2-ethylhexyl, mecoprop-isoctyl, mecoprop-methyl, mecoprop-potassium, mecoprop-sodium and mecoprop-trolamine.

[0231] Suitable salts of mecoprop-P are for example mecoprop-P-butotyl, mecoprop-P-dimethylammonium, mecoprop-P-2-ethylhexyl, mecoprop-P-isobutyl, mecoprop-P-potassium and mecoprop-P-sodium.

[0232] A suitable salt of diflufenzopyr is for example diflufenzopyr-sodium.

[0233] A suitable salt of naptalam is for example naptalam-sodium.

[0234] Suitable salts and esters of aminocyclopyrachlor are for example aminocyclopyrachlor-dimethylammonium, aminocyclopyrachlor-methyl, aminocyclopyrachlor-triisopropanolammonium, aminocyclopyrachlor-sodium and aminocyclopyrachlor-potassium.

[0235] A suitable salt of quinclorac is for example quinclorac-dimethylammonium.

[0236] A suitable salt of quinmerac is for example quinclorac-dimethylammonium.

[0237] A suitable salt of imazamox is for example imazamox-ammonium.

[0238] Suitable salts of imazapic are for example imazapic-ammonium and imazapic-isopropylammonium.

[0239] Suitable salts of imazapyr are for example imazapyr-ammonium and imazapyr-isopropylammonium.

[0240] A suitable salt of imazaquin is for example imazaquin-ammonium.

[0241] Suitable salts of imazethapyr are for example imazethapyr-ammonium and imazethapyr-isopropylammonium.

[0242] A suitable salt of topramezone is for example topramezone-sodium.

[0243] The preferred embodiments of the invention mentioned herein below have to be understood as being preferred either independently from each other or in combination with one another.

[0244] According to a preferred embodiment of the invention, the composition comprises as component B at least one, preferably exactly one herbicide B.

[0245] According to another preferred embodiment of the invention, the composition comprises at least two, preferably exactly two, herbicides B different from each other.

[0246] According to another preferred embodiment of the invention, the composition comprises at least three, preferably exactly three, herbicides B different from each other.

[0247] According to another preferred embodiment of the invention, the composition comprises as component A at least one, preferably exactly one PPO-inhibiting herbicide, preferably acifluorfen, acifluorfen-sodium, butafenacil, cinidon-ethyl, carfentrazone-ethyl, flumioxazin, fluthiacet-methyl, fomesafen, lactofen, oxadiargyl, oxyfluorfen, saflufenacil, sulfentrazone, ethyl [3-[2-chloro-4-fluoro-5-(1-methyl-6-trifluoromethyl-2,4-dioxo-1,2,3,4-tetrahydropyrimidin-3-yl)-phenoxy]-2-pyridyloxy]acetate (CAS 353292-31-6; S-3100; 1,5-dimethyl-6-thioxo-3-(2,2,7-trifluoro-3-oxo-4-(prop-2-ynyl)-3,4-dihydro-2H-benzo[b][1,4]oxazin-6-yl)-1,3,5-triazinane-2,4-dione (CAS 1258836-72-4), especially preferred saflufenacil, 1,5-dimethyl-6-thioxo-3-(2,2,7-trifluoro-3-oxo-4-(prop-2-ynyl)-3,4-dihydro-2H-benzo[b][1,4]oxazin-6-yl)-1,3,5-triazinane-2,4-dione (CAS 1258836-72-4), and as component B at least one, preferably exactly one, herbicide B.

[0248] According to another preferred embodiment of the invention, the composition comprises as component A at least one, preferably exactly preferably exactly one PPO-inhibiting herbicide, preferably acifluorfen, acifluorfen-sodium, butafenacil, cinidon-ethyl, carfentrazone-ethyl, flumioxazin, fluthiacet-methyl, fomesafen, lactofen, oxadiargyl, oxyfluorfen, saflufenacil, sulfentrazone, ethyl [3-[2-chloro-4-fluoro-5-(1-methyl-6-trifluoromethyl-2,4-dioxo-1,2,3,4-tetrahydropyrimidin-3-yl)phenoxy]-2-pyridyloxy]acetate (CAS 353292-31-6; S-3100), 1,5-dimethyl-6-thioxo-3-(2,2,7-trifluoro-3-oxo-4-(prop-2-ynyl)-3,4-dihydro-2H-benzo[b][1,4]oxazin-6-yl)-1,3,5-triazinane-2,4-dione (CAS 1258836-72-4), especially preferred saflufenacil, 1,5-dimethyl-6-thioxo-3-(2,2,7-trifluoro-3-oxo-4-(prop-2-ynyl)-3,4-dihydro-2H-benzo[b][1,4]oxazin-6-yl)-1,3,5-triazinane-2,4-dione (CAS 1258836-72-4), and at least two, preferably exactly two, herbicides B different from each other.

[0249] According to another preferred embodiment of the invention, the composition comprises as component A at least one, preferably exactly preferably exactly one PPO-inhibiting herbicide, preferably acifluorfen, acifluorfen-sodium, butafenacil, cinidon-ethyl, carfentrazone-ethyl, flumioxazin, fluthiacet-methyl, fomesafen, lactofen, oxadiargyl, oxyfluorfen, saflufenacil, sulfentrazone, ethyl [3-[2-chloro-4-fluoro-5-(1-methyl-6-trifluoromethyl-2,4-dioxo-1,2,3,4-tetrahydropyrimidin-3-yl)phenoxy]-2-pyridyloxy]acetate (CAS 353292-31-6; S-3100), 1,5-dimethyl-6-thioxo-3-(2,2,7-trifluoro-3-oxo-4-(prop-2-ynyl)-3,4-dihydro-2H-benzo[b][1,4]oxazin-6-yl)-1,3,5-triazinane-2,4-dione (CAS 1258836-72-4), especially preferred saflufenacil, 1,5-dimethyl-6-thioxo-3-(2,2,7-trifluoro-3-oxo-4-(prop-2-ynyl)-3,4-dihydro-2H-benzo[b][1,4]oxazin-6-yl)-1,3,5-triazinane-2,4-dione (CAS 1258836-72-4) and at least three, preferably exactly three, herbicides B different from each other.

[0250] According to another preferred embodiment of the invention, the composition comprises, in addition to a PPO-inhibiting herbicide, preferably acifluorfen, acifluorfen-sodium, butafenacil, cinidon-ethyl, carfentrazone-ethyl, flumioxazin, fluthiacet-methyl, fomesafen, lactofen, oxadiargyl, oxyfluorfen, saflufenacil, sulfentrazone, ethyl [3-[2-chloro-4-fluoro-5-(1-methyl-6-trifluoromethyl-2,4-dioxo-1,2,3,4-tetrahydropyrimidin-3-yl)phenoxy]-2-pyridyloxy]acetate (CAS 353292-31-6; S-3100), 1,5-dimethyl-6-thioxo-3-(2,2,7-trifluoro-3-oxo-4-(prop-2-ynyl)-3,4-dihydro-2H-benzo[b][1,4]oxazin-6-yl)-1,3,5-triazinane-2,4-dione (CAS 1258836-72-4), especially preferred saflufenacil, 1,5-dimethyl-6-thioxo-3-(2,2,7-trifluoro-3-oxo-4-(prop-2-ynyl)-3,4-dihydro-2H-benzo[b][1,4]oxazin-6-yl)-1,3,5-triazinane-2,4-dione (CAS 1258836-72-4), at least one and especially exactly one herbicidally active compound from group b1), in particular selected from the group consisting of clethodim, clodinafop-propargyl, cycloxydim, cyhalofop-butyl, fenoxaprop-P-ethyl, fluazifop, pinoxaden, profoxydim, quizalofop, sethoxydim, tepraloxydim, tralkoxydim, esprocarb, prosulfocarb, thiobencarb and triallate.

[0251] According to another preferred embodiment of the invention, the composition comprises, in addition to a PPO-inhibiting herbicide, preferably acifluorfen, acifluorfen-sodium, butafenacil, cinidon-ethyl, carfentrazone-ethyl, flumioxazin, fluthiacet-methyl, fomesafen, lactofen, oxadiargyl, oxyfluorfen, saflufenacil, sulfentrazone, ethyl [3-[2-chloro-4-fluoro-5-(1-methyl-6-trifluoromethyl-2,4-dioxo-1,2,3,4-tetrahydropyrimidin-3-yl)phenoxy]-2-pyridyloxy]acetate (CAS 353292-31-6; S-3100, 1,5-dimethyl-6-thioxo-3-(2,2,7-trifluoro-3-oxo-4-(prop-2-ynyl)-3,4-dihydro-2H-benzo[b][1,4]oxazin-6-yl)-1,3,5-triazinane-2,4-dione (CAS 1258836-72-4) especially preferred saflufenacil, 1,5-dimethyl-6-thioxo-3-(2,2,7-trifluoro-3-oxo-4-(prop-2-ynyl)-3,4-dihydro-2H-benzo[b][1,4]oxazin-6-yl)-1,3,5-triazinane-2,4-dione (CAS 1258836-72-4), at least one and especially exactly one herbicidally active compound from group b2), in particular selected from the group consisting of bensulfuron-methyl, bispyribac-sodium, cloransulam-methyl, cyclosulfamuron, diclosulam, flumetsulam, flupyrsulfuron-methyl-sodium, foramsulfuron, halosulfuron-methyl, imazamox, imazapic, imazapyr, imazaquin, imazethapyr, imazosulfuron, iodosulfuron, iodosulfuron-methyl-sodium, mesosulfuron-methyl, metazosulfuron, nicosulfuron, penoxsulam, propoxycarbazon-sodium, pyrazosulfuron-ethyl, pyrithiobac-sodium, pyroxsulam, rimsulfuron, sulfosulfuron, thiencarbazon-methyl, thifensulfuron-methyl, trifloxysulfuron and tritosulfuron.

[0252] According to another preferred embodiment of the invention, the composition comprises, in addition to a a PPO-inhibiting herbicide, preferably acifluorfen, acifluorfen-sodium, butafenacil, cinidon-ethyl, carfentrazone-ethyl, flumioxazin, fluthiacet-methyl, fomesafen, lactofen, oxadiargyl, oxyfluorfen, saflufenacil, sulfentrazone, ethyl [3-[2-chloro-4-fluoro-5-(1-methyl-6-trifluoromethyl-2,4-dioxo-1,2,3,4-tetrahydropyrimidin-3-yl)phenoxy]-2-pyridyloxy]acetate (CAS 353292-31-6; S-3100), 1,5-dimethyl-6-thioxo-3-(2,2,7-trifluoro-3-oxo-4-(prop-2-ynyl)-3,4-dihydro-2H-benzo[b][1,4]oxazin-6-yl)-1,3,5-triazinane-2,4-dione (CAS 1258836-72-4), especially preferred saflufenacil, 1,5-dimethyl-6-thioxo-3-(2,2,7-trifluoro-3-oxo-4-(prop-2-ynyl)-3,4-dihydro-2H-benzo[b][1,4]oxazin-6-yl)-1,3,5-triazinane-2,4-dione (CAS 1258836-72-4), at least one and especially exactly one herbicidally active compound from group b3), in particular selected from the group consisting of ametryn, atrazine, bentazon, bromoxynil, diuron, fluometuron, hexazinone, isoproturon, linuron, metribuzin, paraquat, paraquat-dichloride, prometryne, propanil, terbutryn and terbuthylazine.

[0253] According to another preferred embodiment of the invention, the composition comprises, in addition to a a PPO-inhibiting herbicide, preferably acifluorfen, acifluorfen-sodium, butafenacil, cinidon-ethyl, carfentrazone-ethyl, flumioxazin, fluthiacet-methyl, fomesafen, lactofen, oxadiargyl, oxyfluorfen, saflufenacil, sulfentrazone, ethyl [3-[2-chloro-4-fluoro-5-(1-methyl-6-trifluoromethyl-2,4-dioxo-1,2,3,4-tetrahydropyrimidin-3-yl)phenoxy]-2-pyridyloxy]acetate (CAS 353292-31-6; S-3100), 1,5-dimethyl-6-thioxo-3-(2,2,7-trifluoro-3-oxo-4-(prop-2-ynyl)-3,4-dihydro-2H-benzo[b][1,4]oxazin-6-yl)-1,3,5-triazinane-2,4-dione (CAS 1258836-72-4), especially preferred saflufenacil, 1,5-dimethyl-6-thioxo-3-(2,2,7-trifluoro-3-oxo-4-(prop-2-ynyl)-3,4-dihydro-2H-benzo[b][1,4]oxazin-6-yl)-1,3,5-triazinane-2,4-dione (CAS 1258836-72-4), at least one and especially exactly one herbicidally active compound from group b4), in particular selected from the group consisting of acifluorfen, acifluorfen-sodium, azafenidin, bencarbazone, benzfendizone, bifenox, butafenacil, carfentrazone, carfentrazone-ethyl, chlomethoxyfen, cinidon-ethyl, fluazolate, flufenpyr, flufenpyr-ethyl, flumiclorac, flumiclorac-pentyl, flumioxazin, fluoroglycofen, fluoroglycofen-ethyl, fluthiacet, fluthiacet-methyl, fomesafen, halosafen, lactofen, oxadiargyl, oxadiazon, oxyfluorfen, pentoxazone, profluazol, pyraclonil, pyraflufen, pyraflufen-ethyl, saflufenacil, sulfentrazone, thidiazimin, tiafenacil, ethyl [3-[2-chloro-4-fluoro-5-(1-methyl-6-trifluoromethyl-2,4-dioxo-1,2,3,4-tetrahydropyrimidin-3-yl)phenoxy]-2-pyridyloxy]acetate (CAS 353292-31-6; S-3100), N-ethyl-3-(2,6-dichloro-4-trifluoromethylphenoxy)-5-methyl-1H-pyrazole-1-carboxamide (CAS 452098-92-9), N-tetrahydrofurfuryl-3-(2,6-dichloro-4-trifluoromethylphenoxy)-5-methyl-1H-pyrazole-1-carboxamide (CAS 915396-43-9), N-ethyl-3-(2-chloro-6-fluoro-4-trifluoromethylphenoxy)-5-methyl-1H-pyrazole-1-carboxamide (CAS 452099-05-7), N-tetrahydrofurfuryl-3-(2-chloro-6-fluoro-4-trifluoromethylphenoxy)-5-methyl-1H-pyrazole-1-carboxamide (CAS 452100-03-7), 3-[7-fluoro-3-oxo-4-(prop-2-ynyl)-3,4-dihydro-2H-benzo[1,4]oxazin-6-yl]-1,5-dimethyl-6-thioxo-[1,3,5]triazinan-2,4-dione, 1,5-dimethyl-6-thioxo-3-(2,2,7-trifluoro-3-oxo-4-(prop-2-ynyl)-3,4-dihydro-2H-benzo[b][1,4]oxazin-6-yl)-1,3,5-triazinane-2,4-dione (CAS 1258836-72-4), 2-(2,2,7-Trifluoro-3-oxo-4-prop-2-ynyl-3,4-dihydro-2H-benzo[1,4]oxazin-6-yl)-4,5,6,7-tetrahydro-isoindole-1,3-dione, 1-Methyl-6-trifluoromethyl-3-(2,2,7-trifluoro-3-oxo-4-prop-2-ynyl-3,4-dihydro-2H-benzo[1,4]oxazin-6-yl)-1H-pyrimidine-2,4-dione, methyl (E)-4-[2-chloro-5-[4-chloro-5-(difluoromethoxy)-1H-methyl-pyrazol-3-yl]-4-fluoro-phenoxy]-3-methoxy-but-2-enoate [CAS 948893-00-3], 3-[7-Chloro-5-fluoro-2-(trifluoromethyl)-1H-benzimidazol-4-yl]-1-methyl-6-(trifluoromethyl)-1H-pyrimidine-2,4-dione (CAS 212754-02-4).

[0254] According to another preferred embodiment of the invention, the composition comprises, in addition to a a PPO-inhibiting herbicide, preferably acifluorfen, acifluorfen-sodium, butafenacil, cinidon-ethyl, carfentrazone-ethyl, flumioxazin, fluthiacet-methyl, fomesafen, lactofen, oxadiargyl, oxyfluorfen, saflufenacil, sulfentrazone, ethyl [3-[2-chloro-4-fluoro-5-(1-methyl-6-trifluoromethyl-2,4-dioxo-1,2,3,4-tetrahydropyrimidin-3-yl)phenoxy]-2-pyridyloxy]acetate (CAS 353292-31-6; S-3100), 1,5-dimethyl-6-thioxo-3-(2,2,7-trifluoro-3-oxo-4-(prop-2-ynyl)-3,4-dihydro-2H-benzo[b][1,4]oxazin-6-yl)-1,3,5-triazinane-2,4-dione (CAS 1258836-72-4), especially preferred saflufenacil, 1,5-dimethyl-6-thioxo-3-(2,2,7-trifluoro-3-oxo-4-(prop-2-ynyl)-3,4-dihydro-2H-benzo[b][1,4]oxazin-6-yl)-1,3,5-triazinane-2,4-dione (CAS 1258836-72-4), at least one and especially exactly one herbicidally active compound from group b5), in particular selected from the group consisting of clomazone, diflufenican, flurochloridone, isoxaflutole, mesotrione, picolinafen, sulcotrione, tefuryltrione, tembotrione, topramezone, bicyclopyrone, amitrole and flumeturon.

[0255] According to another preferred embodiment of the invention, the composition comprises, in addition to a a PPO-inhibiting herbicide, preferably acifluorfen, acifluorfen-sodium, butafenacil, cinidon-ethyl, carfentrazone-ethyl, flumioxazin, fluthiacet-methyl, fomesafen, lactofen, oxadiargyl, oxyfluorfen, saflufenacil, sulfentrazone, ethyl [3-[2-chloro-4-fluoro-5-(1-methyl-6-trifluoromethyl-2,4-dioxo-1,2,3,4-tetrahydropyrimidin-3-yl)phenoxy]-2-pyridyloxy]acetate (CAS 353292-31-6; S-3100), 1,5-dimethyl-6-thioxo-3-(2,2,7-trifluoro-3-oxo-4-(prop-2-ynyl)-3,4-dihydro-2H-benzo[b][1,4]oxazin-6-yl)-1,3,5-triazinane-2,4-dione (CAS 1258836-72-4), especially preferred saflufenacil, 1,5-dimethyl-6-thioxo-3-(2,2,7-trifluoro-3-oxo-4-(prop-2-ynyl)-3,4-dihydro-2H-benzo[b][1,4]oxazin-6-yl)-1,3,5-triazinane-2,4-dione (CAS 1258836-72-4), at least one and especially exactly one herbicidally active compound from group b6), in particular selected from the group consisting of glyphosate, glyphosate-isopropylammonium and glyphosate-trimesium (sulfosate).

[0256] According to another preferred embodiment of the invention, the composition comprises, in addition to a a PPO-inhibiting herbicide, preferably acifluorfen, acifluorfen-sodium, butafenacil, cinidon-ethyl, carfentrazone-ethyl, flumioxazin, fluthiacet-methyl, fomesafen, lactofen, oxadiargyl, oxyfluorfen, saflufenacil, sulfentrazone, ethyl [3-[2-chloro-4-fluoro-5-(1-methyl-6-trifluoromethyl-2,4-dioxo-1,2,3,4-tetrahydropyrimidin-3-yl)phenoxy]-2-pyridyloxy]acetate (CAS 353292-31-6; S-3100), 1,5-dimethyl-6-thioxo-3-(2,2,7-trifluoro-3-oxo-4-(prop-2-ynyl)-3,4-dihydro-2H-benzo[b][1,4]oxazin-6-yl)-1,3,5-triazinane-2,4-dione (CAS 1258836-72-4), especially preferred saflufenacil, 1,5-dimethyl-6-thioxo-3-(2,2,7-trifluoro-3-oxo-4-(prop-2-ynyl)-3,4-dihydro-2H-benzo[b][1,4]oxazin-6-yl)-1,3,5-triazinane-2,4-dione (CAS 1258836-72-4), at least one and especially exactly one herbicidally active compound from group b7), in particular selected from the group consisting of glufosinate, glufosinate-P and glufosinate-ammonium.

[0257] According to another preferred embodiment of the invention, the composition comprises, in addition to a a PPO-inhibiting herbicide, preferably acifluorfen, acifluorfen-sodium, butafenacil, cinidon-ethyl, carfentrazone-ethyl, flumioxazin, fluthiacet-methyl, fomesafen, lactofen, oxadiargyl, oxyfluorfen, saflufenacil, sulfentrazone, ethyl [3-[2-chloro-4-fluoro-5-(1-methyl-6-trifluoromethyl-2,4-dioxo-1,2,3,4-tetrahydropyrimidin-3-yl)phenoxy]-2-pyridyloxy]acetate (CAS 353292-31-6; S-3100, 1,5-dimethyl-6-thioxo-3-(2,2,7-trifluoro-3-oxo-4-(prop-2-ynyl)-3,4-dihydro-2H-benzo[b][1,4]oxazin-6-yl)-1,3,5-triazinane-2,4-dione (CAS 1258836-72-4) especially preferred saflufenacil, 1,5-dimethyl-6-thioxo-3-(2,2,7-trifluoro-3-oxo-4-(prop-2-ynyl)-3,4-dihydro-2H-benzo[b][1,4]oxazin-6-yl)-1,3,5-triazinane-2,4-dione (CAS 1258836-72-4), at least one and especially exactly one herbicidally active compound from group b9), in particular selected from the group consisting of pendimethalin and trifluralin.

[0258] According to another preferred embodiment of the invention, the composition comprises, in addition to a PPO-inhibiting herbicide, preferably acifluorfen, acifluorfen-sodium, butafenacil, cinidon-ethyl, carfentrazone-ethyl, flumioxazin, fluthiacet-methyl, fomesafen, lactofen, oxadiargyl, oxyfluorfen, saflufenacil, sulfentrazone, ethyl [3-[2-chloro-4-fluoro-5-(1-methyl-6-trifluoromethyl-2,4-dioxo-1,2,3,4-tetrahydropyrimidin-3-yl)phenoxy]-2-pyridyloxy]acetate (CAS 353292-31-6; S-3100, 1,5-dimethyl-6-thioxo-3-(2,2,7-trifluoro-3-oxo-4-(prop-2-ynyl)-3,4-dihydro-2H-benzo[b][1,4]oxazin-6-yl)-1,3,5-triazinane-2,4-dione (CAS 1258836-72-4)), especially preferred saflufenacil, 1,5-dimethyl-6-thioxo-3-(2,2,7-trifluoro-3-oxo-4-(prop-2-ynyl)-3,4-dihydro-2H-benzo[b][1,4]oxazin-6-yl)-1,3,5-triazinane-2,4-dione (CAS 1258836-72-4), at least one and especially exactly one herbicidally active compound from group b10), in particular selected from the group consisting of acetochlor, cafenstrole, dimethenamid-P, fentrazamide, flufenacet, mefenacet, metazachlor, metolachlor, S-metolachlor, fenoxasulfone and pyroxasulfone. Likewise, preference is given to compositions comprising in addition to a a PPO-inhibiting herbicide, preferably acifluorfen, acifluorfen-sodium, butafenacil, cinidon-ethyl, carfentrazone-ethyl, flumioxazin, fluthiacet-methyl, fomesafen, lactofen, oxadiargyl, oxyfluorfen, saflufenacil, sulfentrazone, ethyl [3-[2-chloro-4-fluoro-5-(1-methyl-6-trifluoromethyl-2,4-dioxo-1,2,3,4-tetrahydropyrimidin-3-yl)phenoxy]-2-pyridyloxy]acetate (CAS 353292-31-6; S-3100), 1,5-dimethyl-6-thioxo-3-(2,2,7-trifluoro-3-oxo-4-(prop-2-ynyl)-3,4-dihydro-2H-benzo[b][1,4]oxazin-6-yl)-1,3,5-triazinane-2,4-dione (CAS 1258836-72-4), especially preferred saflufenacil, 1,5-dimethyl-6-thioxo-3-(2,2,7-trifluoro-3-oxo-4-(prop-2-ynyl)-3,4-dihydro-2H-benzo[b][1,4]oxazin-6-yl)-1,3,5-triazinane-2,4-dione (CAS 1258836-72-4), at least one and especially exactly one herbicidally active compound from group b10), in particular selected from the group consisting of isoxazoline compounds of the formulae II.1, II.2, II.3, II.4, II.5, II.6, II.7, II.8 and II.9, as defined above.

[0259] According to another preferred embodiment of the invention, the composition comprises, in addition to a PPO-inhibiting herbicide, preferably acifluorfen, acifluorfen-sodium, butafenacil, cinidon-ethyl, carfentrazone-ethyl, flumioxazin, fluthiacet-methyl, fomesafen, lactofen, oxadiargyl, oxyfluorfen, saflufenacil, sulfentrazone, ethyl [3-[2-chloro-4-fluoro-5-(1-methyl-6-trifluoromethyl-2,4-dioxo-1,2,3,4-tetrahydropyrimidin-3-yl)phenoxy]-2-pyridyloxy]acetate (CAS 353292-31-6; S-3100, 1,5-dimethyl-6-thioxo-3-(2,2,7-trifluoro-3-oxo-4-(prop-2-ynyl)-3,4-dihydro-2H-benzo[b][1,4]oxazin-6-yl)-1,3,5-triazinane-2,4-dione (CAS 1258836-72-4), especially preferred saflufenacil, 1,5-dimethyl-6-thioxo-3-(2,2,7-trifluoro-3-oxo-4-(prop-2-ynyl)-3,4-dihydro-2H-benzo[b][1,4]oxazin-6-yl)-1,3,5-triazinane-2,4-dione (CAS 1258836-72-4), at least one and especially exactly one herbicidally active compound from group b13), in particular selected from the group consisting of 2,4-D and its salts and esters, aminocyclopyrachlor and its salts and esters, aminopyralid and its salts such as aminopyralid-tris(2-hydroxypropyl)ammonium and its esters, clopyralid and its salts and esters, dicamba and its salts and esters, fluroxypyr-meptyl, quinclorac and quinmerac.

[0260] According to another preferred embodiment of the invention, the composition comprises, in addition to a PPO-inhibiting herbicide, preferably acifluorfen, acifluorfen-sodium, butafenacil, cinidon-ethyl, carfentrazone-ethyl, flumioxazin, fluthiacet-methyl, fomesafen, lactofen, oxadiargyl, oxyfluorfen, saflufenacil, sulfentrazone, ethyl [3-[2-chloro-4-fluoro-5-(1-methyl-6-trifluoromethyl-2,4-dioxo-1,2,3,4-tetrahydropyrimidin-3-yl)phenoxy]-2-pyridyloxy]acetate (CAS 353292-31-6; S-3100), 1,5-dimethyl-6-thioxo-3-(2,2,7-trifluoro-3-oxo-4-(prop-2-ynyl)-3,4-dihydro-2H-benzo[b][1,4]oxazin-6-yl)-1,3,5-triazinane-2,4-dione (CAS 1258836-72-4), especially preferred saflufenacil, 1,5-dimethyl-6-thioxo-3-(2,2,7-trifluoro-3-oxo-4-(prop-2-ynyl)-3,4-dihydro-2H-benzo[b][1,4]oxazin-6-yl)-1,3,5-triazinane-2,4-dione (CAS 1258836-72-4), at least one and especially exactly one herbicidally active compound from group b14), in particular selected from the group consisting of diflufenzopyr and diflufenzopyr-sodium.

[0261] According to another preferred embodiment of the invention, the composition comprises, in addition to a PPO-inhibiting herbicide, preferably acifluorfen, acifluorfen-sodium, butafenacil, cinidon-ethyl, carfentrazone-ethyl, flumioxazin, fluthiacet-methyl, fomesafen, lactofen, oxadiargyl, oxyfluorfen, saflufenacil, sulfentrazone, ethyl [3-[2-chloro-4-fluoro-5-(1-methyl-6-trifluoromethyl-2,4-dioxo-1,2,3,4-tetrahydropyrimidin-3-yl)phenoxy]-2-pyridyloxy]acetate (CAS 353292-31-6; S-3100), 1,5-dimethyl-6-thioxo-3-(2,2,7-trifluoro-3-oxo-4-(prop-2-ynyl)-3,4-dihydro-2H-benzo[b][1,4]oxazin-6-yl)-1,3,5-triazinane-2,4-dione (CAS 1258836-72-4), especially preferred saflufenacil, 1,5-dimethyl-6-thioxo-3-(2,2,7-trifluoro-3-oxo-4-(prop-2-ynyl)-3,4-dihydro-2H-benzo[b][1,4]oxazin-6-yl)-1,3,5-triazinane-2,4-dione (CAS 1258836-72-4), at least one and especially exactly one herbicidally active compound from group b15), in particular selected from the group consisting of dymron (=daimuron), indanofan, indaziflam, oxaziclomefone and triaziflam.

[0262] Here and below, the term “binary compositions” includes compositions comprising one or more, for example 1, 2 or 3, active compounds of the PPO-inhibiting herbicide and either one or more, for example 1, 2 or 3, herbicides B.

[0263] In binary compositions comprising at least one PPO-inhibiting herbicide as component A and at least one herbicide B, the weight ratio of the active compounds A:B is generally in the range of from 1:1000 to 1000:1, preferably in the range of from 1:500 to 500:1, in particular in the range of from 1:250 to 250:1 and particularly preferably in the range of from 1:75 to 75:1.

[0264] Particularly preferred herbicides B are the herbicides B as defined above; in particular the herbicides B.1-B.229 listed below in table B:

TABLE B

| | Herbicide B |
|---|---|
| B.1 | clethodim |
| B.2 | clodinafop-propargyl |
| B.3 | cycloxydim |
| B.4 | cyhalofop-butyl |
| B.5 | fenoxaprop-ethyl |
| B.6 | fenoxaprop-P-ethyl |
| B.7 | fluazifop |
| B.8 | metamifop |
| B.9 | pinoxaden |
| B.10 | profoxydim |
| B.11 | quizalofop |
| B.12 | sethoxydim |
| B.13 | tepraloxydim |
| B.14 | tralkoxydim |
| B.15 | esprocarb |
| B.16 | ethofumesate |
| B.17 | molinate |
| B.18 | prosulfocarb |
| B.19 | thiobencarb |
| B.20 | triallate |
| B.21 | bensulfuron-methyl |
| B.22 | bispyribac-sodium |
| B.23 | cloransulam-methyl |
| B.24 | chlorsulfuron |
| B.25 | clorimuron |
| B.26 | cyclosulfamuron |
| B.27 | diclosulam |
| B.28 | florasulam |
| B.29 | flumetsulam |
| B.30 | flupyrsulfuron-methyl-sodium |
| B.31 | foramsulfuron |
| B.32 | halosulfuron-methyl |
| B.33 | imazamox |
| B.34 | imazamox-ammonium |
| B.35 | imazapic |
| B.36 | imazapic-ammonium |
| B.37 | imazapic-isopropylammonium |
| B.38 | imazapyr |
| B.39 | imazapyr-ammonium |
| B.40 | imazapyr-isopropylammonium |
| B.41 | imazaquin |
| B.42 | imazaquin-ammonium |
| B.43 | imazethapyr |
| B.44 | imazethapyr-ammonium |
| B.45 | imazethapyr-isopropylammonium |
| B.46 | imazosulfuron |
| B.47 | iodosulfuron-methyl-sodium |
| B.48 | iofensulfuron |
| B.49 | iofensulfuron-sodium |
| B.50 | mesosulfuron-methyl |
| B.51 | metazosulfuron |
| B.52 | metsulfuron-methyl |
| B.53 | metosulam |
| B.54 | nicosulfuron |
| B.55 | penoxsulam |
| B.56 | propoxycarbazon-sodium |
| B.57 | pyrazosulfuron-ethyl |
| B.58 | pyribenzoxim |
| B.59 | pyriftalid |
| B.60 | pyrithiobac-sodium |
| B.61 | pyroxsulam |
| B.62 | propyrisulfuron |
| B.63 | rimsulfuron |
| B.64 | sulfosulfuron |
| B.65 | thiencarbazone-methyl |
| B.66 | thifensulfuron-methyl |
| B.67 | tribenuron-methyl |
| B.68 | trifloxysulfuron |
| B.69 | tritosulfuron |
| B.70 | triafamone |
| B.71 | ametryne |
| B.72 | atrazine |
| B.73 | bentazon |
| B.74 | bromoxynil |
| B.75 | bromoxynil-octanoate |
| B.76 | bromoxynil-heptanoate |
| B.77 | bromoxynil-potassium |
| B.78 | diuron |
| B.79 | fluometuron |
| B.80 | hexazinone |
| B.81 | isoproturon |
| B.82 | linuron |
| B.83 | metamitron |
| B.84 | metribuzin |
| B.85 | prometryne |
| B.86 | propanil |
| B.87 | simazin |
| B.88 | terbuthylazine |
| B.89 | terbutryn |
| B.90 | paraquat-dichloride |
| B.91 | acifluorfen |
| B.92 | acifluorfen-sodium |
| B.93 | azafenidin |
| B.94 | bencarbazone |
| B.95 | benzfendizone |
| B.96 | bifenox |
| B.97 | butafenacil |
| B.98 | carfentrazone |
| B.99 | carfentrazone-ethyl |
| B.100 | chlomethoxyfen |
| B.101 | cinidon-ethyl |
| B.102 | fluazolate |
| B.103 | flufenpyr |
| B.104 | flufenpyr-ethyl |
| B.105 | flumiclorac |
| B.106 | flumiclorac-pentyl |
| B.107 | flumioxazin |
| B.108 | fluoroglycofen |
| B.109 | fluoroglycofen-ethyl |
| B.110 | fluthiacet |
| B.111 | fluthiacet-methyl |
| B.112 | fomesafen |
| B.113 | halosafen |
| B.114 | lactofen |
| B.115 | oxadiargyl |
| B.116 | oxadiazon |
| B.117 | oxyfluorfen |
| B.118 | pentoxazone |
| B.119 | profluazol |
| B.120 | pyraclonil |
| B.121 | pyraflufen |
| B.122 | pyraflufen-ethyl |
| B.123 | saflufenacil |
| B.124 | sulfentrazone |
| B.125 | thidiazimin |
| B.126 | tiafenacil |
| B.127 | ethyl [3-[2-chloro-4-fluoro-5-(1-methyl-6-trifluoromethyl-2,4-di- |
| | oxo-1,2,3,4-tetrahydropyrimidin-3-yl)phenoxy]-2-pyridyl- |
| | oxy]acetate (CAS 353292-31-6) |
| B.128 | 1,5-dimethyl-6-thioxo-3-(2,2,7-trifluoro-3-oxo-4-(prop-2-ynyl)- |
| | 3,4-dihydro-2H-benzo[b][1,4]-oxazin-6-yl)-1,3,5- |
| | triazinane-2,4-dione (CAS 1258836-72-4) |
| B.129 | N-ethyl-3-(2,6-dichloro-4-trifluoromethylphenoxy)-5-methyl-1H- |
| | pyrazole-1-carboxamide (CAS 452098-92-9) |
| B.130 | N-tetrahydrofurfuryl-3-(2,6-dichloro-4-trifluoromethylphenoxy)- |
| | 5-methyl-1H-pyrazole-1-carboxamide (CAS 915396-43-9) |
| B.131 | N-ethyl-3-(2-chloro-6-fluoro-4-trifluoromethylphenoxy)-5- |
| | methyl-1H-pyrazole-1-carboxamide (CAS 452099-05-7) |
| B.132 | N-tetrahydrofurfuryl-3-(2-chloro-6-fluoro-4-trifluoro- |
| | methylphenoxy)-5-methyl-1H-pyrazole-1-carboxamide |
| | (CAS 452100-03-7) |
| B.133 | 3-[7-fluoro-3-oxo-4-(prop-2-ynyl)-3,4-dihydro- |
| | 2H-benzo[1,4]oxazin-6-yl]-1,5-dimethyl-6-thioxo- |
| | [1,3,5]triazinan-2,4-dione |
| B.134 | 2-(2,2,7-Trifluoro-3-oxo-4-prop-2-ynyl-3,4-dihydro-2H- |
| | benzo[1,4]oxazin-6-yl)-4,5,6,7-tetrahydro-isoindole-1,3-dione |
| B.135 | 1-Methyl-6-trifluoromethyl-3-(2,2,7-trifluoro-3-oxo-4-prop-2- |
| | ynyl-3,4-dihydro-2H-benzo[1,4]oxazin-6-yl)-1H- |
| | pyrimidine-2,4-dione |
| B.136 | methyl (E)-4-[2-chloro-5-[4-chloro-5-(difluoromethoxy)-1H- |
| | methyl-pyrazol-3-yl]-4-fluoro-phenoxy]-3-methoxy-but-2- |
| | enoate [CAS 948893-00-3] |
| B.137 | 3-[7-Chloro-5-fluoro-2-(trifluoromethyl)-1H-benzimidazol-4-yl]- |
| | 1-methyl-6-(trifluoromethyl)-1H-pyrimidine-2,4-dione |
| | (CAS 212754-02-4) |
| B.138 | benzobicyclon |
| B.139 | clomazone |
| B.140 | diflufenican |
| B.141 | flurochloridone |
| B.142 | isoxaflutole |
| B.143 | mesotrione |
| B.144 | norflurazone |
| B.145 | picolinafen |
| B.146 | sulcotrione |
| B.147 | tefuryltrione |
| B.148 | tembotrione |
| B.149 | topramezone |
| B.150 | topramezone-sodium |
| B.151 | bicyclopyrone |
| B.152 | amitrole |
| B.153 | fluometuron |
| B.154 | glyphosate |
| B.155 | glyphosate-ammonium |
| B.156 | glyphosate-dimethylammonium |
| B.157 | glyphosate-isopropylammonium |
| B.158 | glyphosate-trimesium (sulfosate) |
| B.159 | glyphosate-potassium |
| B.160 | glufosinate |
| B.161 | glufosinate-ammonium |
| B.162 | glufosinate-P |
| B.163 | glufosinate-P-ammonium |
| B.164 | pendimethalin |
| B.165 | trifluralin |
| B.166 | acetochlor |
| B.167 | butachlor |
| B.168 | cafenstrole |
| B.169 | dimethenamid-P |
| B.170 | fentrazamide |
| B.171 | flufenacet |
| B.172 | mefenacet |
| B.173 | metazachlor |
| B.174 | metolachlor |
| B.175 | S-metolachlor |
| B.176 | pretilachlor |
| B.177 | fenoxasulfone |
| B.178 | isoxaben |
| B.179 | ipfencarbazone |
| B.180 | pyroxasulfone |
| B.181 | 2,4-D |
| B.182 | 2,4-D-isobutyl |
| B.183 | 2,4-D-dimethylammonium |
| B.184 | 2,4-D-N,N,N-trimethylethanolammonium |
| B.185 | aminopyralid |
| B.186 | aminopyralid-methyl |
| B.187 | aminopyralid-tris(2-hydroxypropyl)ammonium |
| B.188 | clopyralid |
| B.189 | clopyralid-methyl |
| B.190 | clopyralid-olamine |
| B.191 | dicamba |
| B.192 | dicamba-butotyl |
| B.193 | dicamba-diglycolamine |
| B.194 | dicamba-dimethylammonium |
| B.195 | dicamba-diolamine |
| B.196 | dicamba-isopropylammonium |
| B.197 | dicamba-potassium |
| B.198 | dicamba-sodium |
| B.199 | dicamba-trolamine |
| B.200 | dicamba-N,N-bis-(3-aminopropyl)methylamine |
| B.201 | dicamba-diethylenetriamine |
| B.202 | fluroxypyr |
| B.203 | fluroxypyr-meptyl |
| B.204 | MCPA |
| B.205 | MCPA-2-ethylhexyl |
| B.206 | MCPA-dimethylammonium |
| B.207 | quinclorac |
| B.208 | quinclorac-dimethylammonium |
| B.209 | quinmerac |
| B.210 | quinmerac-dimethylammonium |
| B.211 | aminocyclopyrachlor |
| B.212 | aminocyclopyrachlor-potassium |
| B.213 | aminocyclopyrachlor-methyl |
| B.214 | diflufenzopyr |
| B.215 | diflufenzopyr-sodium |
| B.216 | dymron |
| B.217 | indanofan |
| B.218 | indaziflam |
| B.219 | oxaziclomefone |
| B.220 | triaziflam |
| B.221 | II.1 |
| B.222 | II.2 |
| B.223 | II.3 |
| B.224 | II.4 |
| B.225 | II.5 |
| B.226 | II.6 |
| B.227 | II.7 |
| B.228 | II.8 |
| B.229 | II.9 |

[0265] Particularly preferred are compositions 1.1 to 1.229, comprising acifluorfen and the substance(s) as defined in the respective row of table B-1:

TABLE B-1
(compositions 1.1 to 1.229):

| comp. no. | herbicide B |
|---|---|
| 1.1 | B.1 |
| 1.2 | B.2 |
| 1.3 | B.3 |
| 1.4 | B.4 |
| 1.5 | B.5 |
| 1.6 | B.6 |
| 1.7 | B.7 |
| 1.8 | B.8 |
| 1.9 | B.9 |
| 1.10 | B.10 |
| 1.11 | B.11 |
| 1.12 | B.12 |
| 1.13 | B.13 |
| 1.14 | B.14 |
| 1.15 | B.15 |
| 1.16 | B.16 |
| 1.17 | B.17 |
| 1.18 | B.18 |
| 1.19 | B.19 |
| 1.20 | B.20 |
| 1.21 | B.21 |
| 1.22 | B.22 |
| 1.23 | B.23 |
| 1.24 | B.24 |
| 1.25 | B.25 |
| 1.26 | B.26 |
| 1.27 | B.27 |
| 1.28 | B.28 |
| 1.29 | B.29 |
| 1.30 | B.30 |
| 1.31 | B.31 |
| 1.32 | B.32 |
| 1.33 | B.33 |
| 1.34 | B.34 |
| 1.35 | B.35 |
| 1.36 | B.36 |
| 1.37 | B.37 |
| 1.38 | B.38 |
| 1.39 | B.39 |
| 1.40 | B.40 |
| 1.41 | B.41 |
| 1.42 | B.42 |
| 1.43 | B.43 |
| 1.44 | B.44 |
| 1.45 | B.45 |
| 1.46 | B.46 |
| 1.47 | B.47 |
| 1.48 | B.48 |
| 1.49 | B.49 |
| 1.50 | B.50 |
| 1.51 | B.51 |
| 1.52 | B.52 |
| 1.53 | B.53 |
| 1.54 | B.54 |
| 1.55 | B.55 |
| 1.56 | B.56 |
| 1.57 | B.57 |
| 1.58 | B.58. |
| 1.59 | B.59 |
| 1.60 | B.60 |
| 1.61 | B.61 |
| 1.62 | B.62 |
| 1.63 | B.63 |
| 1.64 | B.64 |
| 1.65 | B.65 |
| 1.66 | B.66 |
| 1.67 | B.67 |
| 1.68 | B.68 |
| 1.69 | B.69 |
| 1.70 | B.70 |
| 1.71 | B.71 |
| 1.72 | B.72 |
| 1.73 | B.73 |
| 1.74 | B.74 |
| 1.75 | B.75 |
| 1.76 | B.76 |
| 1.77 | B.77 |
| 1.78 | B.78 |
| 1.79 | B.79 |
| 1.80 | B.80 |
| 1.81 | B.81 |
| 1.82 | B.82 |
| 1.83 | B.83 |
| 1.84 | B.84 |
| 1.85 | B.85 |
| 1.86 | B.86 |
| 1.87 | B.87 |
| 1.88 | B.88 |
| 1.89 | B.89 |
| 1.90 | B.90 |
| 1.91 | B.91 |
| 1.92 | B.92 |
| 1.93 | B.93 |
| 1.94 | B.94 |
| 1.95 | B.95 |
| 1.96 | B.96 |
| 1.97 | B.97 |
| 1.98 | B.98 |
| 1.99 | B.99 |
| 1.100 | B.100 |
| 1.101 | B.101 |
| 1.102 | B.102 |
| 1.103 | B.103 |
| 1.104 | B.104 |
| 1.105 | B.105 |
| 1.106 | B.106 |
| 1.107 | B.107 |
| 1.108 | B.108 |
| 1.109 | B.109 |
| 1.110 | B.110 |
| 1.111 | B.111 |
| 1.112 | B.112 |
| 1.113 | B.113 |
| 1.114 | B.114 |
| 1.115 | B.115 |
| 1.116 | B.116 |
| 1.117 | B.117 |
| 1.118 | B.118 |
| 1.119 | B.119 |
| 1.120 | B.120 |
| 1.121 | B.121 |
| 1.122 | B.122 |
| 1.123 | B.123 |
| 1.124 | B.124 |
| 1.125 | B.125 |
| 1.126 | B.126 |
| 1.127 | B.127 |
| 1.128 | B.128 |
| 1.129 | B.129 |
| 1.130 | B.130 |
| 1.131 | B.131 |
| 1.132 | B.132 |
| 1.133 | B.133 |
| 1.134 | B.134 |
| 1.135 | B.135 |
| 1.136 | B.136 |
| 1.137 | B.137 |
| 1.138 | B.138 |
| 1.139 | B.139 |
| 1.140 | B.140 |
| 1.141 | B.141 |
| 1.142 | B.142 |
| 1.143 | B.143 |
| 1.144 | B.144 |
| 1.145 | B.145 |
| 1.146 | B.146 |
| 1.147 | B.147 |
| 1.148 | B.148 |
| 1.149 | B.149 |
| 1.150 | B.150 |
| 1.151 | B.151 |
| 1.152 | B.152 |
| 1.153 | B.153 |
| 1.154 | B.154 |
| 1.155 | B.155 |
| 1.156 | B.156 |
| 1.157 | B.157 |
| 1.158 | B.158 |
| 1.159 | B.159 |
| 1.160 | B.160 |
| 1.161 | B.161 |
| 1.162 | B.162 |
| 1.163 | B.163 |
| 1.164 | B.164 |
| 1.165 | B.165 |
| 1.166 | B.166 |
| 1.167 | B.167 |
| 1.168 | B.168 |
| 1.169 | B.169 |
| 1.170 | B.170 |
| 1.171 | B.171 |
| 1.172 | B.172 |
| 1.173 | B.173 |
| 1.174 | B.174 |
| 1.175 | B.175 |
| 1.176 | B.176 |
| 1.177 | B.177 |
| 1.178 | B.178 |
| 1.179 | B.179 |
| 1.180 | B.180 |
| 1.181 | B.181 |
| 1.182 | B.182 |
| 1.183 | B.183 |
| 1.184 | B.184 |
| 1.185 | B.185 |
| 1.186 | B.186 |
| 1.187 | B.187 |
| 1.188 | B.188 |
| 1.189 | B.189 |
| 1.190 | B.190 |
| 1.191 | B.191 |
| 1.192 | B.192 |
| 1.193 | B.193 |
| 1.194 | B.194 |
| 1.195 | B.195 |
| 1.196 | B.196 |
| 1.197 | B.197 |
| 1.198 | B.198 |
| 1.199 | B.199 |
| 1.200 | B.200 |
| 1.201 | B.201 |
| 1.202 | B.202 |
| 1.203 | B.203 |
| 1.204 | B.204 |
| 1.205 | B.205 |
| 1.206 | B.206 |
| 1.207 | B.207 |
| 1.208 | B.208 |
| 1.209 | B.209 |
| 1.210 | B.210 |
| 1.211 | B.211 |
| 1.212 | B.212 |
| 1.213 | B.213 |
| 1.214 | B.214 |
| 1.215 | B.215 |
| 1.216 | B.216 |
| 1.217 | B.217 |
| 1.218 | B.218 |
| 1.219 | B.219 |
| 1.220 | B.220 |
| 1.221 | B.221 |
| 1.222 | B.222 |
| 1.223 | B.223 |
| 1.224 | B.224 |
| 1.225 | B.225 |
| 1.226 | B.226 |
| 1.227 | B.227 |
| 1.228 | B.228 |
| 1.229 | B.229 |

[0266] Also especially preferred are compositions 2.1. to 2.229 which differ from the corresponding compositions 1.1 to 1.229 only in that they comprise as component A acifluorfen-sodium.

[0267] Also especially preferred are compositions 3.1. to 3.229 which differ from the corresponding compositions 1.1 to 1.229 only in that they comprise as component A azafenidin.

[0268] Also especially preferred are compositions 4.1. to 4.229 which differ from the corresponding compositions 1.1 to 1.229 only in that they comprise as component A bencarbazone.

[0269] Also especially preferred are compositions 5.1. to 5.229 which differ from the corresponding compositions 1.1 to 1.229 only in that they comprise as component A benzfendizone.

[0270] Also especially preferred are compositions 6.1. to 6.229 which differ from the corresponding compositions 1.1 to 1.229 only in that they comprise as component A bifenox.

[0271] Also especially preferred are compositions 7.1. to 7.229 which differ from the corresponding compositions 1.1 to 1.227 only in that they comprise as component A butafenacil.

[0272] Also especially preferred are compositions 8.1. to 8.229 which differ from the corresponding compositions 1.1 to 1.229 only in that they comprise as component A carfentrazone.

[0273] Also especially preferred are compositions 9.1. to 9.229which differ from the corresponding compositions 1.1 to 1. 229 only in that they comprise as component A carfentrazone-ethyl.

[0274] Also especially preferred are compositions 10.1. to 10.229 which differ from the corresponding compositions 1.1 to 1.229 only in that they comprise as component A chlomethoxyfen.

[0275] Also especially preferred are compositions 11.1. to 11.229 which differ from the corresponding compositions 1.1 to 1.229 only in that they comprise as component A cinidon-ethyl.

[0276] Also especially preferred are compositions 12.1. to 12.229 which differ from the corresponding compositions 1.1 to 1.229 only in that they comprise as component A fluazolate.

[0277] Also especially preferred are compositions 13.1. to 13.229 which differ from the corresponding compositions 1.1 to 1.229 only in that they comprise as component A flufenpyr.

[0278] Also especially preferred are compositions 14.1. to 14.229 which differ from the corresponding compositions 1.1 to 1.229 only in that they comprise as component A flufenpyr-ethyl.

[0279] Also especially preferred are compositions 15.1. to 15.229 which differ from the corresponding compositions 1.1 to 1.229 only in that they comprise as component A flumiclorac.

[0280] Also especially preferred are compositions 16.1. to 16.229 which differ from the corresponding compositions 1.1 to 1.229 only in that they comprise as component A flumiclorac-pentyl.

[0281] Also especially preferred are compositions 17.1. to 17.229 which differ from the corresponding compositions 1.1 to 1.229 only in that they comprise as component A flumioxazin.

[0282] Also especially preferred are compositions 18.1. to 18.229 which differ from the corresponding compositions 1.1 to 1.229 only in that they comprise as component A fluoroglycofen.

[0283] Also especially preferred are compositions 19.1. to 19.229 which differ from the corresponding compositions 1.1 to 1.229 only in that they comprise as component A fluoroglycofen-ethyl.

[0284] Also especially preferred are compositions 20.1. to 20.229 which differ from the corresponding compositions 1.1 to 1.229 only in that they comprise as component A fluthiacet.

[0285] Also especially preferred are compositions 21.1. to 21.229 which differ from the corresponding compositions 1.1 to 1.229 only in that they comprise as component A fluthiacet-methyl.

[0286] Also especially preferred are compositions 22.1. to 22.229 which differ from the corresponding compositions 1.1 to 1.229 only in that they comprise as component A fomesafen.

[0287] Also especially preferred are compositions 23.1. to 23.229 which differ from the corresponding compositions 1.1 to 1.229 only in that they comprise as component A halosafen.

[0288] Also especially preferred are compositions 24.1. to 24.229 which differ from the corresponding compositions 1.1 to 1.229 only in that they comprise as component A lactofen.

[0289] Also especially preferred are compositions 25.1. to 25.229 which differ from the corresponding compositions 1.1 to 1.229 only in that they comprise as component A oxadiargyl.

[0290] Also especially preferred are compositions 26.1. to 26.229 which differ from the corresponding compositions 1.1 to 1.229 only in that they comprise as component A oxadiazon.

[0291] Also especially preferred are compositions 27.1. to 27.229 which differ from the corresponding compositions 1.1 to 1.229 only in that they comprise as component A oxyfluorfen.

[0292] Also especially preferred are compositions 28.1. to 28.229 which differ from the corresponding compositions 1.1 to 1.229 only in that they comprise as component A pentoxazone.

[0293] Also especially preferred are compositions 29.1. to 29.229 which differ from the corresponding compositions 1.1 to 1.229 only in that they comprise as component A profluazol.

[0294] Also especially preferred are compositions 30.1. to 30.229 which differ from the corresponding compositions 1.1 to 1.229 only in that they comprise as component A pyraclonil.

[0295] Also especially preferred are compositions 31.1. to 31.229 which differ from the corresponding compositions 1.1 to 1.229 only in that they comprise as component A pyraflufen. Also especially preferred are compositions 32.1. to 32.229 which differ from the corresponding compositions 1.1 to 1.229 only in that they comprise as component A pyraflufen-ethyl.

[0296] Also especially preferred are compositions 33.1. to 33.229 which differ from the corresponding compositions 1.1 to 1.229 only in that they comprise as component A saflufenacil.

[0297] Also especially preferred are compositions 34.1. to 34.229 which differ from the corresponding compositions 1.1 to 1.229 only in that they comprise as component A sulfentrazone.

[0298] Also especially preferred are compositions 35.1. to 35.229 which differ from the corresponding compositions 1.1 to 1.229 only in that they comprise as component A thidiazimin.

[0299] Also especially preferred are compositions 36.1. to 36.229 which differ from the corresponding compositions 1.1 to 1.229 only in that they comprise as component A tiafenacil.

[0300] Also especially preferred are compositions 37.1. to 37.229 which differ from the corresponding compositions 1.1 to 1.229 only in that they comprise as component A ethyl [3-[2-chloro-4-fluoro-5-(1-methyl-6-trifluoromethyl-2,4-dioxo-1,2,3,4-tetrahydropyrimidin-3-yl)phenoxy]-2-pyridyloxy]acetate (CAS 353292-31-6; S-3100).

[0301] Also especially preferred are compositions 38.1. to 38.229 which differ from the corresponding compositions 1.1 to 1.229 only in that they comprise as component A 1,5-dimethyl-6-thioxo-3-(2,2,7-trifluoro-3-oxo-4-(prop-2-ynyl)-3,4-dihydro-2H-benzo[b][1,4]oxazin-6-yl)-1,3,5-triazinane-2,4-dione (CAS 1258836-72-4)

[0302] Also especially preferred are compositions 39.1. to 39.229 which differ from the corresponding compositions 1.1 to 1.229 only in that they comprise as component A N-ethyl-3-(2,6-dichloro-4-trifluoromethylphenoxy)-5-methyl-1H-pyrazole-1-carboxamide (CAS 452098-92-9).

[0303] Also especially preferred are compositions 40.1. to 40.229 which differ from the corresponding compositions 1.1 to 1.229 only in that they comprise as component A N-tetrahydrofurfuryl-3-(2,6-dichloro-4-trifluoromethylphenoxy)-5-methyl-1H-pyrazole-1-carboxamide (CAS 915396-43-9).

[0304] Also especially preferred are compositions 41.1. to 41.229 which differ from the corresponding compositions 1.1 to 1.229 only in that they comprise as component A N-ethyl-3-(2-chloro-6-fluoro-4-trifluoromethylphenoxy)-5-methyl-1H-pyrazole-1-carboxamide (CAS 452099-05-7).

[0305] Also especially preferred are compositions 42.1. to 42.229 which differ from the corresponding compositions 1.1 to 1.229 only in that they comprise as component A N-tetrahydrofurfuryl-3-(2-chloro-6-fluoro-4-trifluoromethylphenoxy)-5-methyl-1H-pyrazole-1-carboxamide (CAS 452100-03-7).

[0306] Also especially preferred are compositions 43.1. to 43.229 which differ from the corresponding compositions 1.1 to 1.229 only in that they comprise as component A 3-[7-fluoro-3-oxo-4-(prop-2-ynyl)-3,4-dihydro-2H-benzo[1,4]oxazin-6-yl]-1,5-dimethyl-6-thioxo-[1,3,5]triazinan-2,4-dione.

[0307] Also especially preferred are compositions 44.1. to 44.229 which differ from the corresponding compositions 1.1 to 1.229 only in that they comprise as component A methyl (E)-4-[2-chloro-5-[4-chloro-5-(difluoromethoxy)-1H-methyl-pyrazol-3-yl]-4-fluoro-phenoxy]-3-methoxy-but-2-enoate (CAS 948893-00-3).

[0308] Also especially preferred are compositions 45.1. to 45.229 which differ from the corresponding compositions 1.1 to 1.229 only in that they comprise as component A 3-[7-Chloro-5-fluoro-2-(trifluoromethyl)-1H-benzimidazol-4-yl]-1-methyl-6-(trifluoromethyl)-1H-pyrimidine-2,4-dione (CAS 212754-02-4).

[0309] Also especially preferred are compositions 46.1. to 46.229 which differ from the corresponding compositions 1.1 to 1.229 only in that they comprise as component A 2-(2,2,7-Trifluoro-3-oxo-4-prop-2-ynyl-3,4-dihydro-2H-benzo[1,4]oxazin-6-yl)-4,5,6,7-tetrahydro-isoindole-1,3-dione.

[0310] Also especially preferred are compositions 47.1. to 47.229 which differ from the corresponding compositions 1.1 to 1.229 only in that they comprise as component A 1-Methyl-6-trifluoromethyl-3-(2,2,7-trifluoro-3-oxo-4-prop-2-ynyl-3,4-dihydro-2H-benzo[1,4]oxazin-6-yl)-1H-pyrimidine-2,4-dione

[0311] Also especially preferred are compositions 48.1. to 48.229 which differ from the corresponding compositions 1.1 to 1.229 only in that they additionally comprise benoxacor as safener C.

[0312] Also especially preferred are compositions 49.1. to 49.229 which differ from the corresponding compositions 1.1 to 1.229 only in that they additionally comprise cloquintocet as safener C.

[0313] Also especially preferred are compositions 50.1. to 50.229 which differ from the corresponding compositions 1.1 to 1.229 only in that they additionally comprise cyprosulfamide as safener C.

[0314] Also especially preferred are compositions 51.1. to 51.229 which differ from the corresponding compositions 1.1 to 1.229 only in that they additionally comprise dichlormid as safener C.

[0315] Also especially preferred are compositions 52.1. to 52.229 which differ from the corresponding compositions 1.1 to 1.229 only in that they additionally comprise fenchlorazole as safener C.

[0316] Also especially preferred are compositions 53.1. to 53.229 which differ from the corresponding compositions 1.1 to 1.229 only in that they additionally comprise fenclorim as safener C.

[0317] Also especially preferred are compositions 54.1. to 54.229 which differ from the corresponding compositions 1.1 to 1.229 only in that they additionally comprise furilazole as safener C.

[0318] Also especially preferred are compositions 55.1. to 55.229 which differ from the corresponding compositions 1.1 to 1.229 only in that they additionally comprise isoxadifen as safener C.

[0319] Also especially preferred are compositions 56.1. to 56.229 which differ from the corresponding compositions 1.1 to 1.229 only in that they additionally comprise mefenpyr as safener C.

[0320] Also especially preferred are compositions 57.1. to 57.229 which differ from the corresponding compositions 1.1 to 1.229 only in that they additionally comprise 4-(dichloroacetyl)-1-oxa-4-azaspiro[4.5]decane (MON4660, CAS 71526-07-3) as safener C.

[0321] Also especially preferred are compositions 58.1. to 58.229 which differ from the corresponding compositions 1.1 to 1.229 only in that they additionally comprise 2,2,5-trimethyl-3-(dichloroacetyl)-1,3-oxazolidine (R-29148, CAS 52836-31-4) as safener C.

[0322] It is generally preferred to use the compounds of the invention in combination with herbicides that are selective for the crop being treated and which complement the spectrum of weeds controlled by these compounds at the application rate employed. It is further generally preferred to apply the compounds of the invention and other complementary herbicides at the same time, either as a combination formulation or as a tank mix.

[0323] It is recognized that the polynucleotide molecules and polypeptides of the invention encompass polypeptides comprising an amino acid sequence that is sufficiently identical to the amino acid sequences set forth in SEQ ID Nos: 1, 2, 3, 4, 5, 6, 7, 8, 9, 10, 11, 12, 13, 14, 15, 16, 17, 18, 19, 20, 21, 22, 23, 24, 25, 26, 27, 28, 29, 30, 31, 32, 33, 34, 35, 36, 37, 38, 39, 40, 41, 42, 43, 44, 45, 46, 47, 48, 49, 50, 51, 52, 53, 54, 55, 56, 57, 58, 59, 60, 61, 62, 63, 64, 65, 66, 67, 68, 69, 70, 71, 72, 73, 74, 75, 76, 77, 78, 79, 80, 81, 82, 83, 84, 85, 86, 87, 88, 89, 90, 91, 92, 93, 94, 95, 96, 97, 98, 99, 100, 101, 102, 103, 104, 105, 106, 107, 108, 109, 110, 111, 112, 113, 114, 115, 116, 117, 118, 119, 120, 121, 122, 123, 124, 125, 126, 127, 128, 129, 130, 131, 132, 133, 134, 135, 136, 137, 138, 139, 140, 141, 142, 143, 144, 145, 146, 147, 148, 149, 150, 151, 152, 153, 154, 155, 156, 157, 158, 159, 160, 161, 162, 163, 164, 165, 166, 167, 168, 169, 170, 171, 172, 173, 174, 175, 176, 177, 178, 179, 180, 181, 182, 183, 184, 185, 186, 187, 188, 189, 190, 191, 192, 193, 194, 195, 196, 197, 198, 199, 200, 201, 202, 203, 204, 205, 206, 207, 208, 209, 210, 211, 212, 213, 214, 215, 216, 217, 218, 219, 220, 221, 222, 223, 224, 225, 226, 227, 228, 229, 230, 231, 232, 233, 234, 235, 236, 237, 238, 239, 240, 241, 242, 243, 244, 245, 246, 247, 248, 249, 250, 251, 252, 253, 254, 255, 256, 257, 258, 259, 260, 261, 262, 263, 264, 265, 266, 267, 268, 269, 270, 271, 272, 273, 274, 275, 276, 277, 278, 279, 280, 281, 282, 283, 284, 285, 286, 287, 288, 289, 290, 291, 292, 293, 294, 295, 296, 297, 298, 299, 300, 301, 312, or 313.

[0324] The term “sufficiently identical” is used herein to refer to a first amino acid or nucleotide sequence that contains a sufficient or minimum number of identical or equivalent (e.g., with a similar side chain) amino acid residues or nucleotides to a second amino acid or nucleotide sequence such that the first and second amino acid or nucleotide sequences have a common structural domain and/or common functional activity.

[0325] Generally, “sequence identity” refers to the extent to which two optimally aligned DNA or amino acid sequences are invariant throughout a window of alignment of components, e.g., nucleotides or amino acids. An “identity fraction” for aligned segments of a test sequence and a reference sequence is the number of identical components that are shared by the two aligned sequences divided by the total number of components in reference sequence segment, i.e., the entire reference sequence or a smaller defined part of the reference sequence. “Percent identity” is the identity fraction times 100. Optimal alignment of sequences for aligning a comparison window are well known to those skilled in the art and may be conducted by tools such as the local homology algorithm of Smith and Waterman, the homology alignment algorithm of Needleman and Wunsch, the search for similarity method of Pearson and Lipman, and preferably by computerized implementations of these algorithms such as GAP, BESTFIT, FASTA, and TFASTA available as part of the GCG. Wisconsin Package. (Accelrys Inc. Burlington, Mass.)

[0326] Polynucleotides and Oligonucleotides

[0327] By an “isolated polynucleotide”, including DNA, RNA, or a combination of these, single or double stranded, in the sense or antisense orientation or a combination of both, dsRNA or otherwise, we mean a polynucleotide which is at least partially separated from the polynucleotide sequences with which it is associated or linked in its native state. That means other nucleic acid molecules are present in an amount less than 5% based on weight of the amount of the desired nucleic acid, preferably less than 2% by weight, more preferably less than 1% by weight, most preferably less than 0.5% by weight. Preferably, an “isolated” nucleic acid is free of some of the sequences that naturally flank the nucleic acid (i.e., sequences located at the 5′ and 3′ ends of the nucleic acid) in the genomic DNA of the organism from which the nucleic acid is derived. For example, in various embodiments, the isolated herbicide resistance and/or tolerance related protein encoding nucleic acid molecule can contain less than about 5 kb, 4 kb, 3 kb, 2 kb, 1 kb, 0.5 kb or 0.1 kb of nucleotide sequences which naturally flank the nucleic acid molecule in genomic DNA of the cell from which the nucleic acid is derived. Moreover, an “isolated” nucleic acid molecule, such as a cDNA molecule, can be free from some of the other cellular material with which it is naturally associated, or culture medium when produced by recombinant techniques, or chemical precursors or other chemicals when chemically synthesized. Preferably, the isolated polynucleotide is at least 60% free, preferably at least 75% free, and most preferably at least 90% free from other components with which they are naturally associated. As the skilled addressee would be aware, an isolated polynucleotide can be an exogenous polynucleotide present in, for example, a transgenic organism which does not naturally comprise the polynucleotide. Furthermore, the terms “polynucleotide(s)”, “nucleic acid sequence(s)”, “nucleotide sequence(s)”, “nucleic acid(s)”, “nucleic acid molecule” are used interchangeably herein and refer to nucleotides, either ribonucleotides or deoxyribonucleotides or a combination of both, in a polymeric unbranched form of any length.

[0328] The term “mutated PPO nucleic acid” refers to a PPO nucleic acid having a sequence that is mutated from a wild-type PPO nucleic acid, such as e.g. SEQ ID NO: 302, 303, 304, 305, 306, 307, 308, 309, 310, 311, 314, or homologues, paralogues and and orthologues thereof; and that confers increased PPO-inhibiting herbicide tolerance to a plant in which it is expressed. Furthermore, the term “mutated protoporphyrinogen oxidase (mutated PPO)” refers to the replacement of an amino acid of the wild-type primary sequences SEQ ID NO: 1, 2, 3, 4, 5, 6, 7, 8, 9, 10, 11, 12, 13, 14, 15, 16, 17, 18, 19, 20, 21, 22, 23, 24, 25, 26, 27, 28, 29, 30, 31, 32, 33, 34, 35, 36, 37, 38, 39, 40, 41, 42, 43, 44, 45, 46, 47, 48, 49, 50, 51, 52, 53, 54, 55, 56, 57, 58, 59, 60, 61, 62, 63, 64, 65, 66, 67, 68, 69, 70, 71, 72, 73, 74, 75, 76, 77, 78, 79, 80, 81, 82, 83, 84, 85, 86, 87, 88, 89, 90, 91, 92, 93, 94, 95, 96, 97, 98, 99, 100, 101, 102, 103, 104, 105, 106, 107, 108, 109, 110, 111, 112, 113, 114, 115, 116, 117, 118, 119, 120, 121, 122, 123, 124, 125, 126, 127, 128, 129, 130, 131, 132, 133, 134, 135, 136, 137, 138, 139, 140, 141, 142, 143, 144, 145, 146, 147, 148, 149, 150, 151, 152, 153, 154, 155, 156, 157, 158, 159, 160, 161, 162, 163, 164, 165, 166, 167, 168, 169, 170, 171, 172, 173, 174, 175, 176, 177, 178, 179, 180, 181, 182, 183, 184, 185, 186, 187, 188, 189, 190, 191, 192, 193, 194, 195, 196, 197, 198, 199, 200, 201, 202, 203, 204, 205, 206, 207, 208, 209, 210, 211, 212, 213, 214, 215, 216, 217, 218, 219, 220, 221, 222, 223, 224, 225, 226, 227, 228, 229, 230, 231, 232, 233, 234, 235, 236, 237, 238, 239, 240, 241, 242, 243, 244, 245, 246, 247, 248, 249, 250, 251, 252, 253, 254, 255, 256, 257, 258, 259, 260, 261, 262, 263, 264, 265, 266, 267, 268, 269, 270, 271, 272, 273, 274, 275, 276, 277, 278, 279, 280, 281, 282, 283, 284, 285, 286, 287, 288, 289, 290, 291, 292, 293, 294, 295, 296, 297, 298, 299, 300, 301, 312, or 313 or a variant, a derivative, a homologue, an orthologue, or paralogue thereof, with another amino acid. The expression “mutated amino acid” will be used below to designate the amino acid which is replaced by another amino acid, thereby designating the site of the mutation in the primary sequence of the protein.

[0329] In a preferred embodiment, the PPO nucleotide sequence encoding a mutated PPO comprises the sequence of SEQ ID NO: 302, 303, 304, 305, 306, 307, 308, 309, 310, 311, 314, or a variant or derivative thereof.

[0330] Furthermore, it will be understood by the person skilled in the art that the PPO nucleotide sequences encompasses homologues, paralogues and and orthologues of SEQ ID NO 302, 303, 304, 305, 306, 307, 308, 309, 310, 311, 314, as defined hereinafter.

[0331] The term “variant” with respect to a sequence (e.g., a polypeptide or nucleic acid sequence such as—for example—a transcription regulating nucleotide sequence of the invention) is intended to mean substantially similar sequences. For nucleotide sequences comprising an open reading frame, variants include those sequences that, because of the degeneracy of the genetic code, encode the identical amino acid sequence of the native protein. Naturally occurring allelic variants such as these can be identified with the use of well-known molecular biology techniques, as, for example, with polymerase chain reaction (PCR) and hybridization techniques. Variant nucleotide sequences also include synthetically derived nucleotide sequences, such as those generated, for example, by using site-directed mutagenesis and for open reading frames, encode the native protein, as well as those that encode a polypeptide having amino acid substitutions relative to the native protein, e.g. the mutated PPO according to the present invention as disclosed herein. Generally, nucleotide sequence variants of the invention will have at least 30, 40, 50, 60, to 70%, e.g., preferably 71%, 72%, 73%, 74%, 75%, 76%, 77%, 78%, to 79%, generally at least 80%, e.g., 81%-84%, at least 85%, e.g., 86%, 87%, 88%, 89%, 90%, 91%, 92%, 93%, 94%, 95%, 96%, 97%, to 98% and 99% nucleotide “sequence identity” to the nucleotide sequence encoding a polypeptide of SEQ ID NO: 1, 2, 3, 4, 5, 6, 7, 8, 9, 10, 11, 12, 13, 14, 15, 16, 17, 18, 19, 20, 21, 22, 23, 24, 25, 26, 27, 28, 29, 30, 31, 32, 33, 34, 35, 36, 37, 38, 39, 40, 41, 42, 43, 44, 45, 46, 47, 48, 49, 50, 51, 52, 53, 54, 55, 56, 57, 58, 59, 60, 61, 62, 63, 64, 65, 66, 67, 68, 69, 70, 71, 72, 73, 74, 75, 76, 77, 78, 79, 80, 81, 82, 83, 84, 85, 86, 87, 88, 89, 90, 91, 92, 93, 94, 95, 96, 97, 98, 99, 100, 101, 102, 103, 104, 105, 106, 107, 108, 109, 110, 111, 112, 113, 114, 115, 116 117, 118, 119, 120, 121, 122, 123, 124, 125, 126, 127, 128, 129, 130, 131, 132, 133, 134, 135, 136, 137, 138, 139, 140, 141, 142, 143, 144, 145, 146, 147, 148, 149, 150, 151, 152, 153, 154, 155, 156, 157, 158, 159, 160, 161, 162, 163, 164, 165, 166, 167, 168, 169, 170, 171, 172, 173, 174, 175, 176, 177, 178, 179, 180, 181, 182, 183, 184, 185, 186, 187, 188, 189, 190, 191, 192, 193, 194, 195, 196, 197, 198, 199, 200, 201, 202, 203, 204, 205, 206, 207, 208, 209, 210, 211, 212, 213, 214, 215, 216, 217, 218, 219, 220, 221, 222, 223, 224, 225, 226, 227, 228, 229, 230, 231, 232, 233, 234, 235, 236, 237, 238, 239, 240, 241, 242, 243, 244, 245, 246, 247, 248, 249, 250, 251, 252, 253, 254, 255, 256, 257, 258, 259, 260, 261, 262, 263, 264, 265, 266, 267, 268, 269, 270, 271, 272, 273, 274, 275, 276, 277, 278, 279, 280, 281, 282, 283, 284, 285, 286, 287, 288, 289, 290, 291, 292, 293, 294, 295, 296, 297, 298, 299, 300, 301, 312, or 313. The % identity of a polynucleotide is determined by GAP (Needleman and Wunsch, 1970) analysis (GCG program) with a gap creation penalty=5, and a gap extension penalty=0.3. Unless stated otherwise, the query sequence is at least 45 nucleotides in length, and the GAP analysis aligns the two sequences over a region of at least 45 nucleotides. Preferably, the query sequence is at least 150 nucleotides in length, and the GAP analysis aligns the two sequences over a region of at least 150 nucleotides. More preferably, the query sequence is at least 300 nucleotides in length and the GAP analysis aligns the two sequences over a region of at least 300 nucleotides. Even more preferably, the GAP analysis aligns the two sequences over their entire length.

[0332] Polypeptides

[0333] By “substantially purified polypeptide” or “purified” a polypeptide is meant that has been separated from one or more lipids, nucleic acids, other polypeptides, or other contaminating molecules with which it is associated in its native state. It is preferred that the substantially purified polypeptide is at least 60% free, more preferably at least 75% free, and more preferably at least 90% free from other components with which it is naturally associated. As the skilled addressee will appreciate, the purified polypeptide can be a recombinantly produced polypeptide. The terms “polypeptide” and “protein” are generally used interchangeably and refer to a single polypeptide chain which may or may not be modified by addition of non-amino acid groups. It would be understood that such polypeptide chains may associate with other polypeptides or proteins or other molecules such as co-factors. The terms “proteins” and “polypeptides” as used herein also include variants, mutants, modifications, analogous and/or derivatives of the polypeptides of the invention as described herein.

[0334] The % identity of a polypeptide is determined by GAP (Needleman and Wunsch, 1970) analysis (GCG program) with a gap creation penalty=5, and a gap extension penalty=0.3. The query sequence is at least 25 amino acids in length, and the GAP analysis aligns the two sequences over a region of at least 25 amino acids. More preferably, the query sequence is at least 50 amino acids in length, and the GAP analysis aligns the two sequences over a region of at least 50 amino acids. More preferably, the query sequence is at least 100 amino acids in length and the GAP analysis aligns the two sequences over a region of at least 100 amino acids. Even more preferably, the query sequence is at least 250 amino acids in length and the GAP analysis aligns the two sequences over a region of at least 250 amino acids. Even more preferably, the GAP analysis aligns the two sequences over their entire length.

[0335] With regard to a defined polypeptide, it will be appreciated that % identity figures higher than those provided above will encompass preferred embodiments. Thus, where applicable, in light of the minimum % identity figures, it is preferred that the PPO polypeptide of the invention comprises an amino acid sequence which is at least 40%, more preferably at least 45%, more preferably at least 50%, more preferably at least 55%, more preferably at least 60%, more preferably at least 65%, more preferably at least 70%, more preferably at least 75%, more preferably at least 80%, more preferably at least 85%, more preferably at least 90%, more preferably at least 91%, more preferably at least 92%, more preferably at least 93%, more preferably at least 94%, more preferably at least 95%, more preferably at least 96%, more preferably at least 97%, more preferably at least 98%, more preferably at least 99%, more preferably at least 99.1%, more preferably at least 99.2%, more preferably at least 99.3%, more preferably at least 99.4%, more preferably at least 99.5%, more preferably at least 99.6%, more preferably at least 99.7%, more preferably at least 99.8%, and even more preferably at least 99.9% identical to SEQ ID NO: 1, 2, 3, 4, 5, 6, 7, 8, 9, 10, 11, 12, 13, 14, 15, 16, 17, 18, 19, 20, 21, 22, 23, 24, 25, 26, 27, 28, 29, 30, 31, 32, 33, 34, 35, 36, 37, 38, 39, 40, 41, 42, 43, 44, 45, 46, 47, 48, 49, 50, 51, 52, 53, 54, 55, 56, 57, 58, 59, 60, 61, 62, 63, 64, 65, 66, 67, 68, 69, 70, 71, 72, 73, 74, 75, 76, 77, 78, 79, 80, 81, 82, 83, 84, 85, 86, 87, 88, 89, 90, 91, 92, 93, 94, 95, 96, 97, 98, 99, 100, 101, 102, 103, 104, 105, 106, 107, 108, 109, 110, 111, 112, 113, 114, 115, 116, 117, 118, 119, 120, 121, 122, 123, 124, 125, 126, 127, 128, 129, 130, 131, 132, 133, 134, 135, 136, 137, 138, 139, 140, 141, 142, 143, 144, 145, 146, 147, 148, 149, 150, 151, 152, 153, 154, 155, 156, 157, 158, 159, 160, 161, 162, 163, 164, 165, 166, 167, 168, 169, 170, 171, 172, 173, 174, 175, 176, 177, 178, 179, 180, 181, 182, 183, 184, 185, 186, 187, 188, 189, 190, 191, 192, 193, 194, 195, 196, 197, 198, 199, 200, 201, 202, 203, 204, 205, 206, 207, 208, 209, 210, 211, 212, 213, 214, 215, 216, 217, 218, 219, 220, 221, 222, 223, 224, 225, 226, 227, 228, 229, 230, 231, 232, 233, 234, 235, 236, 237, 238, 239, 240, 241, 242, 243, 244, 245, 246, 247, 248, 249, 250, 251, 252, 253, 254, 255, 256, 257, 258, 259, 260, 261, 262, 263, 264, 265, 266, 267, 268, 269, 270, 271, 272, 273, 274, 275, 276, 277, 278, 279, 280, 281, 282, 283, 284, 285, 286, 287, 288, 289, 290, 291, 292, 293, 294, 295, 296, 297, 298, 299, 300, 301, 312, or 313 .

[0336] By “variant” polypeptide is intended a polypeptide derived from the protein of SEQ ID NO: 1, 2, 3, 4, 5, 6, 7, 8, 9, 10, 11, 12, 13, 14, 15, 16, 17, 18, 19, 20, 21, 22, 23, 24, 25, 26, 27, 28, 29, 30, 31, 32, 33, 34, 35, 36, 37, 38, 39, 40, 41, 42, 43, 44, 45, 46, 47, 48, 49, 50, 51, 52, 53, 54, 55, 56, 57, 58, 59, 60, 61, 62, 63, 64, 65, 66, 67, 68, 69, 70, 71, 72, 73, 74, 75, 76, 77, 78, 79, 80, 81, 82, 83, 84, 85, 86, 87, 88, 89, 90, 91, 92, 93, 94, 95, 96, 97, 98, 99, 100, 101, 102, 103, 104, 105, 106, 107, 108, 109, 110, 111, 112, 113, 114, 115, 116, 117, 118, 119, 120, 121, 122, 123, 124, 125, 126, 127, 128, 129, 130, 131, 132, 133, 134, 135, 136, 137, 138, 139, 140, 141, 142, 143, 144, 145, 146, 147, 148, 149, 150, 151, 152, 153, 154, 155, 156, 157, 158, 159, 160, 161, 162, 163, 164, 165, 166, 167, 168, 169, 170, 171, 172, 173, 174, 175, 176, 177, 178, 179, 180, 181, 182, 183, 184, 185, 186, 187, 188, 189, 190, 191, 192, 193, 194, 195, 196, 197, 198, 199, 200, 201, 202, 203, 204, 205, 206, 207, 208, 209, 210, 211, 212, 213, 214, 215, 216, 217, 218, 219, 220, 221, 222, 223, 224, 225, 226, 227, 228, 229, 230, 231, 232, 233, 234, 235, 236, 237, 238, 239, 240, 241, 242, 243, 244, 245, 246, 247, 248, 249, 250, 251, 252, 253, 254, 255, 256, 257, 258, 259, 260, 261, 262, 263, 264, 265, 266, 267, 268, 269, 270, 271, 272, 273, 274, 275, 276, 277, 278, 279, 280, 281, 282, 283, 284, 285, 286, 287, 288, 289, 290, 291, 292, 293, 294, 295, 296, 297, 298, 299, 300, 301, 312, or 313, by deletion (so-called truncation) or addition of one or more amino acids to the N-terminal and/or C-terminal end of the native protein; deletion or addition of one or more amino acids at one or more sites in the native protein; or substitution of one or more amino acids at one or more sites in the native protein. Such variants may result from, for example, genetic polymorphism or from human manipulation. Methods for such manipulations are generally known in the art.

[0337] “Derivatives” of a protein encompass peptides, oligopeptides, polypeptides, proteins and enzymes having amino acid substitutions, deletions and/or insertions relative to the unmodified protein in question and having similar biological and functional activity as the unmodified protein from which they are derived.

[0338] “Homologues” of a protein encompass peptides, oligopeptides, polypeptides, proteins and enzymes having amino acid substitutions, deletions and/or insertions relative to the unmodified protein in question and having similar biological and functional activity as the unmodified protein from which they are derived.

[0339] A deletion refers to removal of one or more amino acids from a protein.

[0340] An insertion refers to one or more amino acid residues being introduced into a predetermined site in a protein. Insertions may comprise N-terminal and/or C-terminal fusions as well as intra-sequence insertions of single or multiple amino acids. Generally, insertions within the amino acid sequence will be smaller than N- or C-terminal fusions, of the order of about 1 to 10 residues. Examples of N- or C-terminal fusion proteins or peptides include the binding domain or activation domain of a transcriptional activator as used in the yeast two-hybrid system, phage coat proteins, (histidine)-6-tag, glutathione S-transferase-tag, protein A, maltose-binding protein, dihydrofolate reductase, Tag.100 epitope, c-myc epitope, FLAG®-epitope, lacZ, CMP (calmodulin-binding peptide), HA epitope, protein C epitope and VSV epitope.

[0341] A substitution refers to replacement of amino acids of the protein with other amino acids having similar properties (such as similar hydrophobicity, hydrophilicity, antigenicity, propensity to form or break α-helical structures or β-sheet structures). Amino acid substitutions are typically of single residues, but may be clustered depending upon functional constraints placed upon the polypeptide and may range from 1 to 10 amino acids; insertions will usually be of the order of about 1 to 10 amino acid residues. The amino acid substitutions are preferably conservative amino acid substitutions. Conservative substitution tables are well known in the art (see for example Creighton (1984) Proteins. W.H. Freeman and Company (Eds).

TABLE 1
Examples of conserved amino acid substitutions

| | Conservative | | Conservative |
|---|---|---|---|
| Residue | Substitutions | Residue | Substitutions |
| Ala | Ser | Leu | Ile; Val |
| Arg | Lys | Lys | Arg; Gln |
| Asn | Gln; His | Met | Leu; Ile |
| Asp | Glu | Phe | Met; Leu; Tyr |
| Gln | Asn | Ser | Thr; Gly |
| Cys | Ser | Thr | Ser; Val |
| Glu | Asp | Trp | Tyr |
| Gly | Pro | Tyr | Trp; Phe |
| His | Asn; Gln | Val | Ile; Leu |
| Ile | Leu, Val | | |

[0342] Amino acid substitutions, deletions and/or insertions may readily be made using peptide synthetic techniques well known in the art, such as solid phase peptide synthesis and the like, or by recombinant DNA manipulation. Methods for the manipulation of DNA sequences to produce substitution, insertion or deletion variants of a protein are well known in the art. For example, techniques for making substitution mutations at predetermined sites in DNA are well known to those skilled in the art and include M13 mutagenesis, T7-Gen in vitro mutagenesis (USB, Cleveland, Ohio), QuickChange Site Directed mutagenesis (Stratagene, San Diego, Calif.), PCR-mediated site-directed mutagenesis or other site-directed mutagenesis protocols.

[0343] “Derivatives” further include peptides, oligopeptides, polypeptides which may, compared to the amino acid sequence of the naturally-occurring form of the protein, such as the protein of interest, comprise substitutions of amino acids with non-naturally occurring amino acid residues, or additions of non-naturally occurring amino acid residues. “Derivatives” of a protein also encompass peptides, oligopeptides, polypeptides which comprise naturally occurring altered (glycosylated, acylated, prenylated, phosphorylated, myristoylated, sulphated etc.) or non-naturally altered amino acid residues compared to the amino acid sequence of a naturally-occurring form of the polypeptide. A derivative may also comprise one or more non-amino acid substituents or additions compared to the amino acid sequence from which it is derived, for example a reporter molecule or other ligand, covalently or non-covalently bound to the amino acid sequence, such as a reporter molecule which is bound to facilitate its detection, and non-naturally occurring amino acid residues relative to the amino acid sequence of a naturally-occurring protein. Furthermore, “derivatives” also include fusions of the naturally-occurring form of the protein with tagging peptides such as FLAG, HIS6 or thioredoxin (for a review of tagging peptides, see Terpe, Appl. Microbiol. Biotechnol. 60, 523-533, 2003).

[0344] “Orthologues” and “paralogues” encompass evolutionary concepts used to describe the ancestral relationships of genes. Paralogues are genes within the same species that have originated through duplication of an ancestral gene; orthologues are genes from different organisms that have originated through speciation, and are also derived from a common ancestral gene.

[0345] It is well-known in the art that paralogues and orthologues may share distinct domains harboring suitable amino acid residues at given sites, such as binding pockets for particular substrates or binding motifs for interaction with other proteins.

[0346] The term “domain” refers to a set of amino acids conserved at specific positions along an alignment of sequences of evolutionarily related proteins. While amino acids at other positions can vary between homologues, amino acids that are highly conserved at specific positions indicate amino acids that are likely essential in the structure, stability or function of a protein. Identified by their high degree of conservation in aligned sequences of a family of protein homologues, they can be used as identifiers to determine if any polypeptide in question belongs to a previously identified polypeptide family.

[0347] The term “motif” or “consensus sequence” refers to a short conserved region in the sequence of evolutionarily related proteins. Motifs are frequently highly conserved parts of domains, but may also include only part of the domain, or be located outside of conserved domain (if all of the amino acids of the motif fall outside of a defined domain).

[0348] Specialist databases exist for the identification of domains, for example, SMART (Schultz et al. (1998) Proc. Natl. Acad. Sci. USA 95, 5857-5864; Letunic et al. (2002) Nucleic Acids Res 30, 242-244), InterPro (Mulder et al., (2003) Nucl. Acids. Res. 31, 315-318), Prosite (Bucher and Bairoch (1994), A generalized profile syntax for biomolecular sequences motifs and its function in automatic sequence interpretation. (In) ISMB-94; Proceedings 2nd International Conference on Intelligent Systems for Molecular Biology. Altman R., Brutlag D., Karp P., Lathrop R., Searls D., Eds., pp 53-61, AAAI Press, Menlo Park; Hulo et al., Nucl. Acids. Res. 32:D134-D137, (2004)), or Pfam (Bateman et al., Nucleic Acids Research 30(1): 276-280 (2002)). A set of tools for in silico analysis of protein sequences is available on the ExPASy proteomics server (Swiss Institute of Bioinformatics (Gasteiger et al., ExPASy: the proteomics server for in-depth protein knowledge and analysis, Nucleic Acids Res. 31:3784-3788(2003)). Domains or motifs may also be identified using routine techniques, such as by sequence alignment.

[0349] Methods for the alignment of sequences for comparison are well known in the art, such methods include GAP, BESTFIT, BLAST, FASTA and TFASTA. GAP uses the algorithm of Needleman and Wunsch ((1970) J Mol Biol 48: 443-453) to find the global (i.e. spanning the complete sequences) alignment of two sequences that maximizes the number of matches and minimizes the number of gaps. The BLAST algorithm (Altschul et al. (1990) J Mol Biol 215: 403-10) calculates percent sequence identity and performs a statistical analysis of the similarity between the two sequences. The software for performing BLAST analysis is publicly available through the National Centre for Biotechnology Information (NCBI). Homologues may readily be identified using, for example, the ClustalW multiple sequence alignment algorithm (version 1.83), with the default pairwise alignment parameters, and a scoring method in percentage. Global percentages of similarity and identity may also be determined using one of the methods available in the MatGAT software package (Campanella et al., BMC Bioinformatics. 2003 Jul. 10; 4:29. MatGAT: an application that generates similarity/identity matrices using protein or DNA sequences.). Minor manual editing may be performed to optimise alignment between conserved motifs, as would be apparent to a person skilled in the art. Furthermore, instead of using full-length sequences for the identification of homologues, specific domains may also be used. The sequence identity values may be determined over the entire nucleic acid or amino acid sequence or over selected domains or conserved motif(s), using the programs mentioned above using the default parameters. For local alignments, the Smith-Waterman algorithm is particularly useful (Smith T F, Waterman M S (1981) J. Mol. Biol 147(1);195-7).

[0350] The inventors of the present invention have found that by substituting one or more of the key amino acid residues, employing e.g. one of the above described methods to mutate the encoding nucleic acids, the herbicide tolerance or resistance could be remarkably increased as compared to the activity of the wild type PPO enzymes with SEQ ID NO: 1, 2, 3, 4, 5, 6, 7, 8, 9, 10, 11, 12, 13, 14, 15, 16, 17, 18, 19, 20, 21, 22, 23, 24, 25, 26, 27, 28, 29, 30, 31, 32, 33, 34, 35, 36, 37, 38, 39, 40, 41, 42, 43, 44, 45, 46, 47, 48, 49, 50, 51, 52, 53, 54, 55, 56, 57, 58, 59, 60, 61, 62, 63, 64, 65, 66, 67, 68, 69, 70, 71, 72, 73, 74, 75, 76, 77, 78, 79, 80, 81, 82, 83, 84, 85, 86, 87, 88, 89, 90, 91, 92, 93, 94, 95, 96, 97, 98, 99, 100, 101, 102, 103, 104, 105, 106, 107, 108, 109, 110, 111, 112, 113, 114, 115, 116, 117, 118, 119, 120, 121, 122, 123, 124, 125, 126, 127, 128, 129, 130, 131, 132, 133, 134, 135, 136, 137, 138, 139, 140, 141, 142, 143, 144, 145, 146, 147, 148, 149, 150, 151, 152, 153, 154, 155, 156, 157, 158, 159, 160, 161, 162, 163, 164, 165, 166, 167, 168, 169, 170, 171, 172, 173, 174, 175, 176, 177, 178, 179, 180, 181, 182, 183, 184, 185, 186, 187, 188, 189, 190, 191, 192, 193, 194, 195, 196, 197, 198, 199, 200, 201, 202, 203, 204, 205, 206, 207, 208, 209, 210, 211, 212, 213, 214, 215, 216, 217, 218, 219, 220, 221, 222, 223, 224, 225, 226, 227, 228, 229, 230, 231, 232, 233, 234, 235, 236, 237, 238, 239, 240, 241, 242, 243, 244, 245, 246, 247, 248, 249, 250, 251, 252, 253, 254, 255, 256, 257, 258, 259, 260, 261, 262, 263, 264, 265, 266, 267, 268, 269, 270, 271, 272, 273, 274, 275, 276, 277, 278, 279, 280, 281, 282, 283, 284, 285, 286, 287, 288, 289, 290, 291, 292, 293, 294, 295, 296, 297, 298, 299, 300, 301, 312, or 313. Preferred substitutions of mutated PPO are those that increase the herbicide tolerance of the plant, but leave the biological activity of the oxidase activity substantially unaffected.

[0351] Accordingly, in another object of the present invention the key amino acid residues of a PPO enzyme comprising SEQ ID NO: 1, 2, 3, 4, 5, 6, 7, 8, 9, 10, 11, 12, 13, 14, 15, 16, 17, 18, 19, 20, 21, 22, 23, 24, 25, 26, 27, 28, 29, 30, 31, 32, 33, 34, 35, 36, 37, 38, 39, 40, 41, 42, 43, 44, 45, 46, 47, 48, 49, 50, 51, 52, 53, 54, 55, 56, 57, 58, 59, 60, 61, 62, 63, 64, 65, 66, 67, 68, 69, 70, 71, 72, 73, 74, 75, 76, 77, 78, 79, 80, 81, 82, 83, 84, 85, 86, 87, 88, 89, 90, 91, 92, 93, 94, 95, 96, 97, 98, 99, 100, 101, 102, 103, 104, 105, 106, 107, 108, 109, 110, 111, 112, 113, 114, 115, 116, 117, 118, 119, 120, 121, 122, 123, 124, 125, 126, 127, 128, 129, 130, 131, 132, 133, 134, 135, 136, 137, 138, 139, 140, 141, 142, 143, 144, 145, 146, 147, 148, 149, 150, 151, 152, 153, 154, 155, 156, 157, 158, 159, 160, 161, 162, 163, 164, 165, 166, 167, 168, 169, 170, 171, 172, 173, 174, 175, 176, 177, 178, 179, 180, 181, 182, 183, 184, 185, 186, 187, 188, 189, 190, 191, 192, 193, 194, 195, 196, 197, 198, 199, 200, 201, 202, 203, 204, 205, 206, 207, 208, 209, 210, 211, 212, 213, 214, 215, 216, 217, 218, 219, 220, 221, 222, 223, 224, 225, 226, 227, 228, 229, 230, 231, 232, 233, 234, 235, 236, 237, 238, 239, 240, 241, 242, 243, 244, 245, 246, 247, 248, 249, 250, 251, 252, 253, 254, 255, 256, 257, 258, 259, 260, 261, 262, 263, 264, 265, 266, 267, 268, 269, 270, 271, 272, 273, 274, 275, 276, 277, 278, 279, 280, 281, 282, 283, 284, 285, 286, 287, 288, 289, 290, 291, 292, 293, 294, 295, 296, 297, 298, 299, 300, 301, 312, or 313, a variant, derivative, orthologue, paralogue or homologue thereof, is substituted by any other amino acid.

[0352] In one embodiment, the key amino acid residues of a PPO enzyme, a variant, derivative, orthologue, paralogue or homologue thereof, is substituted by a conserved amino acid as depicted in Table 1.

[0353] It will be understood by the person skilled in the art that amino acids located in a close proximity to the positions of amino acids mentioned below may also be substituted. Thus, in another embodiment the variant of SEQ ID NO: 1, 2, 3, 4, 5, 6, 7, 8, 9, 10, 11, 12, 13, 14, 15, 16, 17, 18, 19, 20, 21, 22, 23, 24, 25, 26, 27, 28, 29, 30, 31, 32, 33, 34, 35, 36, 37, 38, 39, 40, 41, 42, 43, 44, 45, 46, 47, 48, 49, 50, 51, 52, 53, 54, 55, 56, 57, 58, 59, 60, 61, 62, 63, 64, 65, 66, 67, 68, 69, 70, 71, 72, 73, 74, 75, 76, 77, 78, 79, 80, 81, 82, 83, 84, 85, 86, 87, 88, 89, 90, 91, 92, 93, 94, 95, 96, 97, 98, 99, 100, 101, 102, 103, 104, 105, 106, 107, 108, 109, 110, 111, 112, 113, 114, 115, 116, 117, 118, 119, 120, 121, 122, 123, 124, 125, 126, 127, 128, 129, 130, 131, 132, 133, 134, 135, 136, 137, 138, 139, 140, 141, 142, 143, 144, 145, 146, 147, 148, 149, 150, 151, 152, 153, 154, 155, 156, 157, 158, 159, 160, 161, 162, 163, 164, 165, 166, 167, 168, 169, 170, 171, 172, 173, 174, 175, 176, 177, 178, 179, 180, 181, 182, 183, 184, 185, 186, 187, 188, 189, 190, 191, 192, 193, 194, 195, 196, 197, 198, 199, 200, 201, 202, 203, 204, 205, 206, 207, 208, 209, 210, 211, 212, 213, 214, 215, 216, 217, 218, 219, 220, 221, 222, 223, 224, 225, 226, 227, 228, 229, 230, 231, 232, 233, 234, 235, 236, 237, 238, 239, 240, 241, 242, 243, 244, 245, 246, 247, 248, 249, 250, 251, 252, 253, 254, 255, 256, 257, 258, 259, 260, 261, 262, 263, 264, 265, 266, 267, 268, 269, 270, 271, 272, 273, 274, 275, 276, 277, 278, 279, 280, 281, 282, 283, 284, 285, 286, 287, 288, 289, 290, 291, 292, 293, 294, 295, 296, 297, 298, 299, 300, 301, 312, or 313, a variant, derivative, orthologue, paralogue or homologue thereof comprises a mutated PPO, wherein an amino acid ±3, ±2 or ±1 amino acid positions from a key amino acid is substituted by any other amino acid.

[0354] Based on techniques well-known in the art, a highly characteristic sequence pattern can be developed, by means of which further of mutated PPO candidates with the desired activity may be searched.

[0355] Searching for further mutated PPO candidates by applying a suitable sequence pattern would also be encompassed by the present invention. It will be understood by a skilled reader that the present sequence pattern is not limited by the exact distances between two adjacent amino acid residues of said pattern. Each of the distances between two neighbours in the above patterns may, for example, vary independently of each other by up to ±10, ±5, ±3, ±2 or ±1 amino acid positions without substantially affecting the desired activity.

[0356] Furthermore, by applying the method of site directed mutagenesis, in particular saturation mutagenes (see e.g. Schenk et al., Biospektrum 03/2006, pages 277-279), the inventors of the present invention have identified and generated specific amino acid substitutions and combinations thereof, which—when introduced into a plant by transforming and expressing the respective mutated PPO encoding nucleic acid—confer increased herbicide resistance or tolerance to a PPO inhibiting herbicide to said plant.

[0357] Thus, in a particularly preferred embodiment, the variant or derivative of the mutated PPO refers to a polypeptide comprising SEQ ID NO: 1, 2, 3, 4, 5, 6, 7, 8, 9, 10, 11, 12, 13, 14, 15, 16, 17, 18, 19, 20, 21, 22, 23, 24, 25, 26, 27, 28, 29, 30, 31, 32, 33, 34, 35, 36, 37, 38, 39, 40, 41, 42, 43, 44, 45, 46, 47, 48, 49, 50, 51, 52, 53, 54, 55, 56, 57, 58, 59, 60, 61, 62, 63, 64, 65, 66, 67, 68, 69, 70, 71, 72, 73, 74, 75, 76, 77, 78, 79, 80, 81, 82, 83, 84, 85, 86, 87, 88, 89, 90, 91, 92, 93, 94, 95, 96, 97, 98, 99, 100, 101, 102, 103, 104, 105, 106, 107, 108, 109, 110, 111, 112, 113, 114, 115, 116, 117, 118, 119, 120, 121, 122, 123, 124, 125, 126, 127, 128, 129, 130, 131, 132, 133, 134, 135, 136, 137, 138, 139, 140, 141, 142, 143, 144, 145, 146, 147, 148, 149, 150, 151, 152, 153, 154, 155, 156, 157, 158, 159, 160, 161, 162, 163, 164, 165, 166, 167, 168, 169, 170, 171, 172, 173, 174, 175, 176, 177, 178, 179, 180, 181, 182, 183, 184, 185, 186, 187, 188, 189, 190, 191, 192, 193, 194, 195, 196, 197, 198, 199, 200, 201, 202, 203, 204, 205, 206, 207, 208, 209, 210, 211, 212, 213, 214, 215, 216, 217, 218, 219, 220, 221, 222, 223, 224, 225, 226, 227, 228, 229, 230, 231, 232, 233, 234, 235, 236, 237, 238, 239, 240, 241, 242, 243, 244, 245, 246, 247, 248, 249, 250, 251, 252, 253, 254, 255, 256, 257, 258, 259, 260, 261, 262, 263, 264, 265, 266, 267, 268, 269, 270, 271, 272, 273, 274, 275, 276, 277, 278, 279, 280, 281, 282, 283, 284, 285, 286, 287, 288, 289, 290, 291, 292, 293, 294, 295, 296, 297, 298, 299, 300, 301, 312, or 313, comprising a single amino acid substitution at positions depicted in the following Table 2a.

TABLE 2a
Single amino acid substitutions within SEQ ID NO: 1, 2, 3, 4, 5, 6, 7, 8, 9, 10, 11, 12,
13, 14, 15, 16, 17, 18, 19, 20, 21, 22, 23, 24, 25, 26, 27, 28, 29, 30, 31, 32, 33, 34, 35, 36, 37,
38, 39, 40, 41, 42, 43, 44, 45, 46, 47, 48, 49, 50, 51, 52, 53, 54, 55, 56, 57, 58, 59, 60, 61, 62,
63, 64, 65, 66, 67, 68, 69, 70, 71, 72, 73, 74, 75, 76, 77, 78, 79, 80, 81, 82, 83, 84, 85, 86, 87,
88, 89, 90, 91, 92, 93, 94, 95, 96, 97, 98, 99, 100, 101, 102, 103, 104, 105, 106, 107, 108, 109,
110, 111, 112, 113, 114, 115, 116, 117, 118, 119, 120, 121, 122, 123, 124, 125, 126, 127, 128,
129, 130, 131, 132, 133, 134, 135, 136, 137, 138, 139, 140, 141, 142, 143, 144, 145, 146, 147,
148, 149, 150, 151, 152, 153, 154, 155, 156, 157, 158, 159, 160, 161, 162, 163, 164, 165, 166,
167, 168, 169, 170, 171, 172, 173, 174, 175, 176, 177, 178, 179, 180, 181, 182, 183, 184, 185,
186, 187, 188, 189, 190, 191, 192, 193, 194, 195, 196, 197, 198, 199, 200, 201, 202, 203, 204,
205, 206, 207, 208, 209, 210, 211, 212, 213, 214, 215, 216, 217, 218, 219, 220, 221, 222, 223,
224, 225, 226, 227, 228, 229, 230, 231, 232, 233, 234, 235, 236, 237, 238, 239, 240, 241, 242,
243, 244, 245, 246, 247, 248, 249, 250, 251, 252, 253, 254, 255, 256, 257, 258, 259, 260, 261,
262, 263, 264, 265, 266, 267, 268, 269, 270, 271, 272, 273, 274, 275, 276, 277, 278, 279, 280,
281, 282, 283, 284, 285, 286, 287, 288, 289, 290, 291, 292, 293, 294, 295, 296, 297, 298, 299,
300, 301, 312, or 313

| | | Mut | Mut | Mut | Mut | Mut |
|---|---|---|---|---|---|---|
| ID | Organism | site 1 | site 2 | site 3 | site 4 | site 5 |
| 1 | 88809979[Amaranthus | R128 | G210 | G211 | L397 | F420 |
| | tuberculatus] | | | | | |
| 2 | PPO[Salinibacter_ruber_M8] | R87 | A161 | G162 | L330 | F353 |
| 3 | PPO[Rhodothermus_marinus | R87 | A162 | G163 | L330 | F353 |
| | DSM4252] | | | | | |
| 4 | PPO[Salinibacter_ruber_DSM13855] | R87 | A161 | G162 | L330 | F353 |
| 5 | PPO[Rhodothermus_marinus_SG05JP17- | R87 | A162 | G163 | L330 | F353 |
| | 172] | | | | | |
| 6 | PPO[Halothio_bacillus_neapolitanusc_2] | R97 | A170 | G171 | L343 | F366 |
| 7 | YP_003547456PPO[Coralio_margarita_akajimensis_DSM45221] | R88 | A163 | G164 | L323 | F346 |
| 8 | YP_863962PPO[Magnetococcus_marinus_MC- | R94 | A167 | G168 | L338 | F361 |
| | 1] | | | | | |
| 9 | YP_001819575PPO[Opitutus_terrae_PB90- | R103 | A178 | G179 | L345 | M368 |
| | 1] | | | | | |
| 10 | YP_006526861PPO[Melioribacter_roseus_P3M- | R88 | A163 | G164 | L333 | F356 |
| | 2] | | | | | |
| 11 | XP_001760919[Physcomitrella_patens] | R83 | G165 | S166 | L362 | F385 |
| 12 | XP_002509548_amineoxidase | R99 | A181 | G182 | L372 | F395 |
| | [Ricinuscommunis] | | | | | |
| 13 | YP_572852PPO[Chromohalobacter_salexigens_DSM3043] | R103 | A177 | G178 | L349 | F372 |
| 14 | YP_006766810PPO[Leptospirillum_ferriphilumML- | R92 | A167 | S168 | L335 | F358 |
| | 04] | | | | | |
| 15 | XP_002984571[Selaginella_moellendorffii] | R97 | G175 | S176 | L377 | F400 |
| 16 | XP_002978633[Selaginella_moellendorffii] | R97 | G175 | S176 | L377 | F400 |
| 17 | NP_196926PPO- | R101 | A182 | A183 | L371 | F394 |
| | likeprotein[Arabidopsis_thaliana] | | | | | |
| 18 | YP_004749312PPO(X)aerobic | R89 | A164 | G165 | L325 | F348 |
| | [Acidithiobacillus_caldus_SM- | | | | | |
| | 1] | | | | | |
| 19 | XP_002873656_HEMG2_MEE61 | R103 | A186 | A187 | L375 | F398 |
| | [Arabidopsis_lyratasubsplyrata] | | | | | |
| 20 | NP_001236376_PPOX[Glycine_max] | R98 | A180 | A181 | L367 | F390 |
| 21 | YP_002568450PPO[Chloroflexus_spY- | R91 | A166 | G167 | L335 | L358 |
| | 400-fl] | | | | | |
| 22 | XP_003622202PPO[Medicago_truncatula] | R98 | A180 | A181 | L367 | F390 |
| 23 | YP_002464647PPO[Chloroflexus_aggregans_DSM9485] | R92 | A167 | G168 | L336 | L359 |
| 24 | XP_002263321_PPO_mitochondrial[Vitis_vinifera] | R100 | G182 | G183 | L373 | F396 |
| 25 | NP_001105004_PPOX(mitochondrial) | R130 | A215 | G216 | L410 | F433 |
| | 2[Zeamays] | | | | | |
| 26 | NP_001190307_[Arabidopsis_thaliana] | R101 | A152 | A153 | L341 | F364 |
| 27 | YP_003433215PPO[Hydrogenobacter_thermophilus_TK- | R84 | A158 | G159 | L310 | Y333 |
| | 6] | | | | | |
| 28 | YP_004151624PPO[Thermovibrio_ammonificans_HB- | R86 | A160 | G161 | L333 | M356 |
| | 1] | | | | | |
| 29 | YP_005845210PPO[Ignavibacterium_album_JCM16511] | R88 | A163 | G164 | L332 | F355 |
| 30 | XP_002446710_06g020950 | R130 | A215 | G216 | L410 | F433 |
| | [Sorghum_bicolor] | | | | | |
| 31 | YP_004281001PPO[Desulfurobacterium_thermolithotrophum_DSM11699] | R86 | A161 | G162 | L333 | M356 |
| 32 | YP_004784657PPO[Acidithiobacillus_ferrivorans_ss3] | R87 | A162 | G163 | L323 | F346 |
| 33 | YP_003474039PPO[Thermocrinis_albus_DSM14484] | — | A158 | G159 | L309 | Y332 |
| 34 | YP_002796374PPO[Laribacter_hongkongensis_HLHK9] | R84 | A159 | G160 | A314 | F337 |
| 35 | YP_002219182PPO[Acidithiobacillus_ferrooxidans_ATCC53993] | R87 | A162 | G163 | L323 | F346 |
| 36 | YP_003496573PPO[Deferribacterde_sulfuricans_SSM1] | R92 | A167 | G168 | L330 | M353 |
| 37 | YP_001228933PPO[Geobacter_uraniireducens_Rf4] | R93 | A170 | G171 | L344 | M367 |
| 38 | YP_002248561PPO[Thermodesulfovibrio_yellowstonii_DSM11347] | R89 | A164 | G165 | L328 | M351 |
| 39 | NP_951074PPO[Geobacter_sulfurreducens_PCA] | R93 | A168 | G169 | L342 | M365 |
| 40 | YP_006889062PPO[Geobacter_sulfurreducens_KN400] | R93 | A168 | G169 | L342 | M365 |
| 41 | NP_214383PPO[Aquifex_aeolicus_VF5] | R86 | A159 | G160 | L309 | F332 |
| 42 | YP_006716472PPO[Pelobacter_carbinolicus_DSM2380] | R92 | A167 | G168 | L340 | M363 |
| 43 | YP_006722497PPO[Geobacter_metallireducens_GS- | R93 | A168 | G169 | L342 | M365 |
| | 15] | | | | | |
| 44 | YP_678185PPO[Cytophagahut_chinsonii_ATCC33406] | R84 | A158 | G159 | A317 | F340 |
| 45 | YP_002539155PPO[Geobacter_daltonii_FRC- | R93 | A170 | G171 | L344 | M367 |
| | 32] | | | | | |
| 46 | NP_906211PPO[Porphyromona_sgingivalis_W83] | R86 | A160 | G161 | L330 | F353 |
| 47 | YP_005367195PPO[Corallococcus_coralloides_DSM2259] | R86 | A161 | G162 | L333 | L356 |
| 48 | YP_004050820PPO[Calditerrivibrio_nitroreducens_DSM19672] | R92 | A166 | G167 | L328 | I351 |
| 49 | YP_004509986PPO[Porphyromonas_gingivalis_TDC60] | R86 | A160 | G161 | L330 | F353 |
| 50 | YP_003951559PPO[Stigmatella_aurantiaca_DW4_3- | R87 | A162 | G163 | L331 | L354 |
| | 1] | | | | | |
| 51 | YP_001928320PPO[Porphyromonas_gingivalis_ATCC33277] | R86 | A160 | G161 | L330 | F353 |
| 52 | YP_005468670PPO[Leptospirillum_ferrooxidans_C2- | R93 | A171 | S172 | L342 | F365 |
| | 3] | | | | | |
| 53 | YP_003390864PPO[Spirosoma_linguale_DSM74] | R92 | A166 | G167 | A326 | F349 |
| 54 | YP_003207907_PPO[Candidatus_methylomirabilis_oxyfera] | T101 | G184 | A185 | I353 | F376 |
| 55 | YP_899713PPO[Pelobacter_propionicus_DSM2379] | R93 | A170 | G171 | L344 | M367 |
| 56 | 214383PPO[Aquifex_aeolicus_VF5] | R86 | A159 | G160 | L309 | F332 |
| 57 | 003207907_PPOX[Candidatus_methylomirabilis_oxyfera] | T101 | G184 | A185 | I353 | F376 |
| 58 | SPTREMBLH5S9D0_9BACT_PPO | R88 | A161 | G162 | L330 | F353 |
| | [BAL527661] | | | | | |
| 59 | SPTREMBLB6APB6_9BACT_PPO | R92 | A167 | S168 | L335 | F358 |
| | [EDZ391021] | | | | | |
| 60 | SPTREMBLJ3SAI0_AMBAR_Mitochondrial_PPO | R74 | G151 | G152 | L336 | F359 |
| | [AFJ041191] | | | | | |
| | Flags:Fragment | | | | | |
| 61 | SPTREMBLA7LIU6_AMAHP_Mitochondrial_PPO | R128 | G210 | G211 | L398 | F421 |
| | [ABS721651] | | | | | |
| 62 | SPTREMBLG5DW06_SILLA_PPO | R96 | A178 | A179 | L361 | F384 |
| | [AEL987031]Flags:Fragment | | | | | |
| 63 | SPTREMBLG5DW07_SILLA_PPO | R96 | A178 | A179 | L361 | F384 |
| | [AEL987041]Flags:Fragment | | | | | |
| 64 | SPTREMBLK4BDT2_SOLLC | R95 | G175 | G176 | L366 | F389 |
| | [Solyc03g00508021] | | | | | |
| 65 | SPTREMBLC6HX77_9BACT_PPO | R92 | A172 | S173 | L339 | F362 |
| | [EES527871] | | | | | |
| 66 | SPTREMBLB4F9N9_MAIZE | R130 | A215 | G216 | L410 | F433 |
| | [ACF788321_GRMZM_2G364901_P04] | | | | | |
| 67 | SPTREMBLI1PMI3_ORYGL | R95 | G180 | G181 | L375 | F398 |
| | [ECO:0000313_ORGLA_04G01402001] | | | | | |
| 68 | SPTREMBLK3Y6C6_SETIT | R128 | A213 | G214 | L408 | F431 |
| | [Si009767m] | | | | | |
| 69 | SPTREMBLI1IZ42_BRADI[BRADI5G141201] | R97 | A182 | G183 | L377 | F400 |
| 70 | SPTREMBLJ3LZ44_ORYBR | R139 | G224 | G225 | L419 | F442 |
| | [OB04G241901] | | | | | |
| 71 | SPTREMBLB8LQQ3_PICSI | R100 | G186 | A187 | L354 | F377 |
| | [ABR179831] | | | | | |
| 72 | SPTREMBLQ7X7T4_ORYSJ_[CAE016612] | R95 | G179 | G180 | L374 | F397 |
| 73 | SPTREMBLQ8L152_PORGN_PPO | R86 | A160 | G161 | L330 | F353 |
| | [BAB930021] | | | | | |
| 74 | ORYSJ_EEE612361 | R95 | G190 | G191 | L385 | F408 |
| 75 | PPO[Salinibacter_ruber_M8] | R87 | A161 | G162 | L330 | F353 |
| 76 | PPO[Rhodothermus_marinus | R87 | A162 | G163 | L330 | F353 |
| | DSM4252] | | | | | |
| 77 | Tcastaneum_EST\|DT795976. | E104 | K158 | S159 | R343 | L366 |
| | orf ORF predicted by | | | | | |
| | ESTScan and supported by | | | | | |
| | blastx | | | | | |
| 78 | Tcastaneum_EST\|DN649354. | K82 | K135 | N136 | V326 | W345 |
| | orf OR Fpredicted by | | | | | |
| | ESTScan and supported by | | | | | |
| | blastx | | | | | |
| 79 | Mycosphaerella_graminicola\| | N98 | — | — | V387 | K415 |
| | estExt_fgenesh1_pm.C_chr_130138 | | | | | |
| 80 | Mycosphaerella_graminicola\|fgenesh1_pg. | P257 | G347 | A348 | L652 | I705 |
| | C_chr_4000196 | | | | | |
| 81 | Mycosphaerella_graminicola\| | R144 | A226 | G227 | L420 | M443 |
| | e_gw1.6.178.1 | | | | | |
| 82 | Apisum_EST\|CN759425.orf | R77 | G161 | G162 | — | L222 |
| | ORF predicted by ESTScan | | | | | |
| | and supported by blastx | | | | | |
| 83 | Schizophyllum_commune\|e_gw1.2.533.1 | K104 | A181 | A182 | L364 | M391 |
| 84 | gi_491060495_WP_004922129.1_[Acinetobacter] | — | — | — | — | V106 |
| 85 | gi_491073786_WP_004935408.1_[Acinetobacter_soli] | — | — | — | — | V106 |
| 86 | gi_640671255_WP_025096265.1_[Acinetobacter_soli] | — | — | — | — | V106 |
| 87 | gi_491300310_WP_005158314.1_[Acinetobacter_sp._NIPH_284] | — | — | — | — | V106 |
| 88 | gi_490943302_WP_004805133.1_[Acinetobacter] | — | — | — | — | V106 |
| 89 | gi_490801335_WP_004663472.1_[Acinetobacter_sp._NIPH_236] | — | — | — | — | V106 |
| 90 | gi_491463643_WP_005321413.1_[Acinetobacter_sp._ANC_3880] | — | — | — | — | V106 |
| 91 | gi_491381361_WP_005239243.1_[Acinetobacter] | — | — | — | — | V106 |
| 92 | gi_491292983_WP_005150999.1_[Acinetobacter_sp._ANC_3929] | — | — | — | — | V106 |
| 93 | gi_490793063_WP_004655209.1_[Acinetobacter] | — | — | — | — | V106 |
| 94 | gi_507093809_WP_016164505.1_[Acinetobacter_sp._CIP_110321] | — | — | — | — | I106 |
| 95 | gi_490909009_WP_004770928.1_[Acinetobacter_sp._NIPH_758] | — | — | — | — | V106 |
| 96 | gi_514351070_WP_016543182.1_Protoporphyrinogen_IX_oxidase_[Acinetobacter_gyllenbergii] | — | — | — | — | V106 |
| 97 | gi_491371149_WP_005229045.1_[Acinetobacter] | — | — | — | — | V106 |
| 98 | gi_494745796_WP_007481204.1_[Acinetobacter_sp._NBRC_100985] | — | — | — | — | V106 |
| 99 | gi_491426157_WP_005283952.1_[Acinetobacter_sp._NIPH_3623] | — | — | — | — | V106 |
| 100 | gi_518214819_WP_019385027.1_[Acinetobacter_venetianus] | — | — | — | — | V106 |
| 101 | gi_491233156_WP_005091388.1_[Acinetobacter] | — | — | — | — | V106 |
| 102 | gi_490807961_WP_004670082.1_[Acinetobacter] | — | — | — | — | V106 |
| 103 | gi_490832850_WP_004694935.1_[Acinetobacter_johnsonii] | — | — | — | — | V106 |
| 104 | gi_491199143_WP_005057487.1_[Acinetobacter_beijerinckii] | — | — | — | — | V106 |
| 105 | gi_517509805_WP_018680013.1_[Acinetobacter_tjernbergiae] | — | — | — | — | V106 |
| 106 | gi_490968207_WP_004830008.1_[Acinetobacter] | — | — | — | — | V106 |
| 107 | gi_490775991_WP_004638180.1_[Acinetobacter_haemolyticus] | — | — | — | — | V106 |
| 108 | gi_446262034_WP_000339889.1_[Acinetobacter_baumannii] | — | — | — | — | V106 |
| 109 | gi_740513810_WP_038343223.1_[Acinetobacter_sp._A47] | — | — | — | — | V106 |
| 110 | gi_490783939_WP_004646107.1_[Acinetobacter] | — | — | — | — | V106 |
| 111 | gi_491019396_WP_004881102.1_[Acinetobacter] | — | — | — | — | V106 |
| 112 | gi_487977643_WP_002050435.1_[Acinetobacter_calcoaceticus/ | — | — | — | — | V106 |
| | baumannii_complex] | | | | | |
| 113 | gi_491223237_WP_005081535.1_[Acinetobacter_haemolyticus] | — | — | — | — | V106 |
| 114 | gi_488052372_WP_002123769.1_[Acinetobacter_baumannii] | — | — | — | — | V106 |
| 115 | gi_507096641_WP_016167285.1_[Bacteria] | — | — | — | — | V106 |
| 116 | gi_490868591_WP_004730607.1_[Acinetobacter_lwoffii] | — | — | — | — | V106 |
| 117 | gi_727733814_WP_033853987.1_[Acinetobacter_baumannii] | — | — | — | — | V106 |
| 118 | gi_491091059_WP_004952667.1_[Acinetobacter_junii] | — | — | — | — | V106 |
| 119 | gi_491001037_WP_004862759.1_[Acinetobacter_gerneri] | — | — | — | — | V106 |
| 120 | gi_507071235_WP_016142013.1_[Acinetobacter_calcoaceticus/ | — | — | — | — | V106 |
| | baumannii_complex] | | | | | |
| 121 | gi_490861624_WP_004723664.1_[Acinetobacter] | — | — | — | — | V106 |
| 122 | gi_691147280_WP_032059889.1_[Acinetobacter_baumannii] | — | — | — | — | V106 |
| 123 | gi_446262035_WP_000339890.1_[Acinetobacter_baumannii] | — | — | — | — | V106 |
| 124 | gi_691132016_WP_032047106.1_[Acinetobacter_baumannii] | — | — | — | — | V106 |
| 125 | gi_491198176_WP_005056522.1_[Acinetobacter_beijerinckii] | — | — | — | — | V106 |
| 126 | gi_490853389_WP_004715441.1_[Acinetobacter_baumannii] | — | — | — | — | V106 |
| 127 | gi_691152991_WP_032064531.1_[Acinetobacter_baumannii] | — | — | — | — | V106 |
| 128 | gi_491153426_WP_005011820.1_[Acinetobacter_bouvetii] | — | — | — | — | V106 |
| 129 | gi_690978247_WP_031952185.1_[Acinetobacter_baumannii] | — | — | — | — | V106 |
| 130 | gi_488062334_WP_002133731.1_[Acinetobacter_baumannii] | — | — | — | — | V106 |
| 131 | gi_490876399_WP_004738397.1_[Acinetobacter_baumannii] | — | — | — | — | V106 |
| 132 | gi_490841261_WP_004703336.1_[Acinetobacter] | — | — | — | — | V106 |
| 133 | gi_491246621_WP_005104820.1_[Acinetobacter] | — | — | — | — | V106 |
| 134 | gi_488048894_WP_002120291.1_[Acinetobacter] | — | — | — | — | V106 |
| 135 | gi_691000309_WP_031967803.1_[Acinetobacter_baumannii] | — | — | — | — | V106 |
| 136 | gi_674997132_dbj_BAP38474.1_AS4_35340_[Acinetobacter_guillouiae] | — | — | — | — | A106 |
| 137 | gi_507068277_WP_016139056.1_[Acinetobacter_calcoaceticus] | — | — | — | — | A106 |
| 138 | gi_490932313_WP_004794166.1_[Acinetobacter_sp._NIPH_817] | — | — | — | — | V106 |
| 139 | gi_491445334_WP_005303121.1_[Acinetobacter_sp._NIPH_542] | — | — | — | — | V106 |
| 140 | gi_490405121_WP_004279237.1_[Acinetobacter] | — | — | — | — | V106 |
| 141 | gi_518597712_WP_019767919.1_[Acinetobacter_pittii] | — | — | — | — | V106 |
| 142 | gi_491132625_WP_004991052.1_[Acinetobacter] | — | — | — | — | V106 |
| 143 | gi_691007858_WP_031972487.1_[Acinetobacter_baumannii] | — | — | — | — | V106 |
| 144 | gi_498011842_WP_010325998.1_[Acinetobacter_lwoffii] | — | — | — | — | V106 |
| 145 | gi_507073740_WP_016144514.1_[Acinetobacter_calcoaceticus/ | — | — | — | — | V106 |
| | baumannii_complex] | | | | | |
| 146 | gi_446262033_WP_000339888.1_[Acinetobacter_baumannii] | — | — | — | — | V106 |
| 147 | gi_740520658_WP_038348690.1_[Acinetobacter_baumannii] | — | — | — | — | V106 |
| 148 | gi_490949350_WP_004811175.1_[Acinetobacter] | — | — | — | — | V106 |
| 149 | gi_763233177_WP_044103433.1_[Acinetobacter_pittii] | — | — | — | — | V106 |
| 150 | gi_491031623_WP_004893309.1_[Acinetobacter] | — | — | — | — | V106 |
| 151 | gi_502963802_WP_013198778.1_[Acinetobacter_oleivorans] | — | — | — | — | A106 |
| 152 | gi_757660258_WP_042898554.1_[Acinetobacter_oleivorans] | — | — | — | — | V106 |
| 153 | gi_491393256_WP_005251118.1_[Acinetobacter_sp._CIP_102136] | — | — | — | — | I106 |
| 154 | gi_737284983_WP_035268308.1_[Acinetobacter_sp._Ver3] | — | — | — | — | M106 |
| 155 | gi_490779430_WP_004641616.1_[Acinetobacter_calcoaceticus] | — | — | — | — | V106 |
| 156 | gi_491542560_WP_005400179.1_[Acinetobacter_johnsonii] | — | — | — | — | V106 |
| 157 | gi_736573757_WP_034585295.1_[Acinetobacter_sp._HR7] | — | — | — | — | V106 |
| 158 | gi_491190266_WP_005048623.1_[Acinetobacter_calcoaceticus] | — | — | — | — | V106 |
| 159 | gi_806779784_gb_KKC42497.1_[Acinetobacter_sp._V2] | — | — | — | — | A106 |
| 160 | gi_491314383_WP_005172361.1_[Acinetobacter_sp._NIPH_713] | — | — | — | — | V106 |
| 161 | gi_490921415_WP_004783286.1_[Acinetobacter] | — | — | — | — | V106 |
| 162 | gi_780011786_WP_045436702.1_[Acinetobacter_calcoaceticus] | — | — | — | — | V106 |
| 163 | gi_489749291_WP_003653300.1_[Acinetobacter_calcoaceticus] | — | — | — | — | V106 |
| 164 | gi_764631789_WP_044437332.1_[Acinetobacter_ursingii] | — | — | — | — | V106 |
| 165 | gi_496875031_WP_009393745.1_[Acinetobacter_sp._WC- | — | — | — | — | A106 |
| | 141] | | | | | |
| 166 | gi_491376400_WP_005234291.1_[Acinetobacter_sp._NIPH_2171] | — | — | — | — | I106 |
| 167 | gi_491184319_WP_005042681.1_[Acinetobacter_calcoaceticus] | — | — | — | — | V106 |
| 168 | gi_491116810_WP_004975266.1_[Acinetobacter] | — | — | — | — | V106 |
| 169 | gi_491237786_WP_005096009.1_[Acinetobacter_lwoffii] | — | — | — | — | V106 |
| 170 | gi_491321890_WP_005179856.1_[Acinetobacter] | — | — | — | — | V106 |
| 171 | gi_696292260_WP_032867909.1_[Acinetobacter_baumannii] | — | — | — | — | V106 |
| 172 | gi_555507570_WP_023272706.1_[Acinetobacter_nectaris] | — | — | — | — | V106 |
| 173 | gi_491160499_WP_005018886.1 | — | — | — | — | V106 |
| 174 | gi_490814452_WP_004676559.1_[Acinetobacter] | — | — | — | — | V106 |
| 175 | gi_741483336_gb_KHW96815.1_[Acinetobacter_baumannii] | — | — | — | — | V98 |
| 176 | gi_490785848_WP_004648010.1_[Acinetobacter_bohemicus] | — | — | — | — | V106 |
| 177 | gi_491052309_WP_004913960.1_[Acinetobacter_junii] | — | — | — | — | V106 |
| 178 | gi_507094777_WP_016165450.1_[Acinetobacter_tandoii] | — | — | — | — | V106 |
| 179 | gi_497801016_WP_010115200.1_[Acinetobacter_sp._P8- | — | — | — | — | V106 |
| | 3-8] | | | | | |
| 180 | gi_514969048_WP_016657344.1_[Acinetobacter_rudis] | — | — | — | — | V104 |
| 181 | gi_491040303_WP_004901972.1_[Acinetobacter_brisouii] | — | — | — | — | V106 |
| 182 | gi_490888651_WP_004750604.1_[Acinetobacter_sp._ANC_3789] | — | — | — | — | V106 |
| 183 | gi_746597285_WP_039623499.1_[Acinetobacter_harbinensis] | — | — | — | — | F106 |
| 184 | hemG [Escherichia coli] | — | — | — | — | I142 |
| 185 | gi_446776703_WP_000853959.1 | — | — | — | — | I142 |
| | [Escherichia coli] | | | | | |
| 186 | gi_585368532_WP_024250110.1_PPO_dehydro_[Enterobacteriaceae] | — | — | — | — | I142 |
| 187 | gi_446776716_WP_000853972.1_PPO_[Shigellaflexneri] | — | — | — | — | I142 |
| 188 | gi_803576760_WP_046082718.1_PPO_[Escherichiafergusonii] | — | — | — | — | I142 |
| 189 | gi_446776730_WP_000853986.1_PPOdehydro_[Shigellaflexneri] | — | — | — | — | I142 |
| 190 | gi_446776711_WP_000853967.1_PPO_[Escherichiaalbertii] | — | — | — | — | I142 |
| 191 | gi_507088140_WP_016158875.1_PPOdehydro_[Escherichia] | — | — | — | — | I142 |
| 192 | gi_745765271_WP_039062592.1_PPO_[Shigellaflexneri] | — | — | — | — | I142 |
| 193 | gi_446776709_WP_000853965.1_PPO_[Escherichiasp.TW15838] | — | — | — | — | I142 |
| 194 | gi_446776715_WP_000853971.1_PPO_[Shigellasonnei] | — | — | — | — | I142 |
| 195 | gi_446776710_WP_000853966.1_PPO_[Escherichiaalbertii] | — | — | — | — | I142 |
| 196 | gi_446776697_WP_000853953.1_PPO_[Escherichiaalbertii] | — | — | — | — | I142 |
| 197 | gi_446776718_WP_000853974.1_PPO_[Enterobacteriaceae] | — | — | — | — | I142 |
| 198 | gi_446776720_WP_000853976.1_PPO_[Shigella] | — | — | — | — | I142 |
| 199 | gi_446776717_WP_000853973.1_PPO_[Shigellaflexneri] | — | — | — | — | I142 |
| 200 | gi_554685272_WP_023185166.1_PPO_[Salmonellaenterica] | — | — | — | — | I142 |
| 201 | gi_308927673_gb_EFP73142.1_PPO_[Shigelladysenteriae | — | — | — | — | I122 |
| | 1617] | | | | | |
| 202 | gi_754936070_WP_042292697.1_PPO_[Citrobactersedlakii] | — | — | — | — | I142 |
| 203 | gi_446776725_WP_000853981.1_PPO_[Salmonellaenterica] | — | — | — | — | I142 |
| 204 | gi_721474711_gb_KGY18299.1_PPO_[Citrobacterkoseri] | — | — | — | — | I142 |
| 205 | gi_446776724_WP_000853980.1_PPO_[Salmonellaenterica] | — | — | — | — | I142 |
| 206 | gi_740611784_WP_038397304.1_PPO_[Salmonellaenterica] | — | — | — | — | I142 |
| 207 | gi_526249624_Poxidaseoxygen- | — | — | — | — | I142 |
| | independent_HemG_[Salmonellabongori] | | | | | |
| 208 | gi_157081684_gb_ABV11362.1_[CitrobacterkoseriATCCBAA- | — | — | — | — | I142 |
| | 895] | | | | | |
| 209 | gi_685237852_WP_031606088.1_PPO_[Salmonellaenterica] | — | — | — | — | I142 |
| 210 | gi_502672073_WP_012907885.1_PPO_[Citrobacterrodentium] | — | — | — | — | I142 |
| 211 | gi_446776722_WP_000853978.1_PPO_[Salmonellabongori] | — | — | — | — | I142 |
| 212 | gi_673531409_emb_CDZ82112.1_PPO_[Citrobacterkoseri] | — | — | — | — | I142 |
| 213 | gi_446776726_WP_000853982.1_PPO_[Salmonellaenterica] | — | — | — | — | I142 |
| 214 | gi_554246566_gb_ESG83296.1_PPO_[Salmonellaenterica | — | — | — | — | I142 |
| | ATCC9263] | | | | | |
| 215 | gi_555286377_WP_023261035.1_PPOdehydro_[Salmonellaenterica] | — | — | — | — | I142 |
| 216 | gi_446776696_WP_000853952.1_PPOdehydro_[Salmonellaenterica] | — | — | — | — | I142 |
| 217 | gi_446776729_WP_000853985.1_PPO_[Salmonellaenterica] | — | — | — | — | I142 |
| 218 | gi_521135495_WP_020437566.1_PPO_[Salmonellaenterica] | — | — | — | — | I142 |
| 219 | gi_565623524_WP_023891183.1_PPO_[Salmonellaenterica] | — | — | — | — | I142 |
| 220 | gi_446776727_WP_000853983.1_PPOdehydro_[Salmonellaenterica] | — | — | — | — | I142 |
| 221 | gi_446776692_WP_000853948.1_PPO_[Salmonellaenterica] | — | — | — | — | I142 |
| 222 | gi_446776723_WP_000853979.1_PPO_[Salmonellaenterica] | — | — | — | — | I142 |
| 223 | gi_446776728_WP_000853984.1_PPOdehydro_[Salmonellaenterica] | — | — | — | — | I142 |
| 224 | gi_446776731_WP_000853987.1_PPO_[Salmonellaenterica] | — | — | — | — | I142 |
| 225 | gi_740607825_WP_038393357.1_PPO_[Salmonellabongori] | — | — | — | — | I142 |
| 226 | gi_555219141_WP_023212016.1_PPO_[Salmonellaenterica | — | — | — | — | I142 |
| 227 | gi_487372158_WP_001645833.1_oxidaseHemG_[Salmonellaenterica] | — | — | — | — | I142 |
| 228 | gi_555265933_WP_023247423.1_PPO_[Salmonellaenterica] | — | — | — | — | I142 |
| 229 | gi_754970294_WP_042326191.1_PPO_[Citrobacterfarmeri] | — | — | — | — | I142 |
| 230 | gi_763106372_WP_043986528.1_PPO_[Salmonellaenterica] | — | — | — | — | I142 |
| 231 | gi_555241082_WP_023225751.1_PPO_[Salmonellaenterica] | — | — | — | — | I142 |
| 232 | gi_677962583_gb_KFU71595.1_PPO_[Salmonella_enterica | — | — | — | — | I142 |
| | CFSAN000181] | | | | | |
| 233 | gi_780043845_WP_045449176.1_PPO_[Citrobactersp.S- | — | — | — | — | I142 |
| | 77] | | | | | |
| 234 | gi_757780254_WP_042998838.1_PPO_[Citrobacter] | — | — | — | — | I142 |
| 235 | gi_391303361_gb_EIQ61198.1_PPO_dehydro_[Shigellaflexneri_1235-66] | — | — | — | — | I142 |
| 236 | gi_489925542_WP_003828882.1_PPO_[Citrobacterfreundii] | — | — | — | — | I142 |
| 237 | gi_489107987_WP_003017846.1_PPO_[Enterobacteriaceae] | — | — | — | — | I142 |
| 238 | gi_353612405_gb_EHC64786.1_oxidase_HemG_[Salmonellaenterica] | — | — | — | — | I142 |
| 239 | gi_489937947_WP_003841254.1_PPO_[Citrobacterfreundii] | — | — | — | — | I142 |
| 240 | gi_749607088_WP_040230104.1_PPO_[Citrobactersp.CIP | — | — | — | — | I142 |
| | 55.13] | | | | | |
| 241 | gi_696370724_WP_032945724.1_PPO_[Citrobacterfreundii] | — | — | — | — | I142 |
| 242 | gi_721586509_gb_KGZ29783.1_PPO_[Citrobacterfreundii] | — | — | — | — | I142 |
| 243 | gi_757801814_WP_043019011.1_PPO_[Citrobacterfreundii] | — | — | — | — | I142 |
| 244 | gi_507084406_WP_016155152.1_PPOdehydro_[Citrobacter | — | — | — | — | I142 |
| | sp.KTE151] | | | | | |
| 245 | gi_817120192_WP_046493069.1_PPO_[Citrobacter_amalonaticus] | — | — | — | — | I142 |
| 246 | gi_496062597_WP_008787104.1_PPO_[Citrobactersp.30_2] | — | — | — | — | I142 |
| 247 | gi_507087120_WP_016157860.1_PPOdehydro_[Citrobacter | — | — | — | — | I142 |
| | sp.KTE32] | | | | | |
| 248 | gi_740849175_WP_038634428.1_PPO_[Citrobacterfreundii] | — | — | — | — | I142 |
| 249 | gi_446981838_WP_001059094.1_PPO_[Salmonellaenterica] | — | — | — | — | I148 |
| 250 | gi_493736907_WP_006686103.1_PPO_[Citrobacteryoungae] | — | — | — | — | I142 |
| 251 | gi_685253248_WP_031613095.1_PPO_partial_[Salmonellaenterica] | — | — | — | — | I132 |
| 252 | gi_772672412_WP_045285595.1_PPO_[Enterobacter_sp_35699] | — | — | — | — | I142 |
| 253 | gi_640460605_WP_024908008.1_PPO_[Enterobacterasburiae] | — | — | — | — | I142 |
| 254 | gi_695718339_WP_032646055.1_PPO_[Enterobacter] | — | — | — | — | I142 |
| 255 | gi_779819602_WP_045336933.1_PPO_[Enterobacterasburiae] | — | — | — | — | I142 |
| 256 | gi_647320203_WP_025757509.1_PPO_[Enterobactercloacae] | — | — | — | — | I142 |
| 257 | gi_798942147_WP_045909212.1_PPO_[Enterobactercloacae] | — | — | — | — | I142 |
| 258 | gi_504646581_WP_014833683.1_PPO_[Enterobactercloacae] | — | — | — | — | I142 |
| 259 | gi_504698508_WP_014885610.1_PPO_[Enterobacter] | — | — | — | — | I142 |
| 260 | gi_495776931_WP_008501510.1_PPO_[Enterobacter] | — | — | — | — | I142 |
| 261 | gi_556497388_WP_023345075.1_PPO_dehydro_[Enterobacter] | — | — | — | — | I142 |
| 262 | gi_556474668_WP_023326273.1_PPO_dehydro_[Enterobacter_sp_MGH_34] | — | — | — | — | I142 |
| 263 | gi_503838244_WP_014072238.1_PPO_[Enterobacter_asburiae] | — | — | — | — | I142 |
| 264 | gi_502864250_WP_013099226.1_PPO_[Enterobacter] | — | — | — | — | I142 |
| 265 | gi_779900435_WP_045372184.1_PPO_[Enterobacterasburiae] | — | — | — | — | I142 |
| 266 | gi_779803830_WP_045330210.1_PPO_[Enterobacterasburiae] | — | — | — | — | I142 |
| 267 | gi_772702242_WP_045294988.1_PPO_[Enterobactersp.42324] | — | — | — | — | I142 |
| 268 | gi_556485438_WP_023333780.1_PPO_dehydro[Enterobacter_spMGH_24] | — | — | — | — | I142 |
| 269 | gi_654547061_WP_028014767.1_PPO_[Enterobacter] | — | — | — | — | I142 |
| 270 | gi_805302683_WP_046092447.1_PPO_[Enterobactercloacae] | — | — | — | — | I142 |
| 271 | gi_527036124_WP_020882866.1_PPO_[Enterobacter_cloacae] | — | — | — | — | I142 |
| 272 | gi_695706440_WP_032641484.1_PPO_[Enterobacter_sp_EGD-HP1] | — | — | — | — | I142 |
| 273 | gi_556479963_WP_023331543.1_PPO_[Enterobacter_cloacae] | — | — | — | — | I142 |
| 274 | gi_654550469_WP_028018162.1_PPO_[Enterobactercloacae] | — | — | — | — | I142 |
| 275 | CoPPO III Escherichia coli K- | S85 | G118 | A119 | R237 | Q256 |
| | 12 substr. MG1655 | | | | | |
| 276 | CoPPO III aerobic[E. coli 3- | S85 | G118 | A119 | R237 | Q256 |
| | 020-07_S1_C3] | | | | | |
| 277 | CoPPO III [Shigella boydii] | S85 | G118 | A119 | R237 | Q256 |
| 278 | CoPPO III, aerobic | S85 | G118 | A119 | R237 | Q256 |
| | [Citrobacter youngae 29220] | | | | | |
| 279 | CoPPO III [Citrobacter] | S85 | G118 | A119 | R237 | Q256 |
| | rodentium | | | | | |
| 280 | CoPPO III [Salmonella] | S85 | G118 | A119 | R237 | Q256 |
| | enterica | | | | | |
| 281 | CoPPO III [Citrobacter] | S85 | G118 | A119 | R237 | Q256 |
| | freundii | | | | | |
| 282 | CoPPO III [Rhizobium sp. | S85 | G118 | A119 | R237 | Q256 |
| | KAs 5-22] | | | | | |
| 283 | CoPPO III [Vibrio | S85 | D118 | A119 | R237 | Q256 |
| | parahaemolyticus] | | | | | |
| 284 | CoPPO III [Enterobacter | S85 | G118 | A119 | R237 | Q256 |
| | lignolyticus] | | | | | |
| 285 | CoPPO III | S85 | G118 | A119 | R237 | Q256 |
| | [Enterobacteriaceae | | | | | |
| | bacterium FGI 57] | | | | | |
| 286 | CoPPO III [Enterobacter | S85 | G118 | A119 | R237 | Q256 |
| | aerogenes] | | | | | |
| 287 | CoPPO III [Kluyvera | S85 | G118 | A119 | R237 | Q256 |
| | ascorbata] | | | | | |
| 288 | CoPPO III [Trabulsiella | S85 | G118 | A119 | R237 | Q256 |
| | guamensis] | | | | | |
| 289 | CoPPO III [Raoultella | S85 | G118 | A119 | R237 | Q256 |
| | planticola] | | | | | |
| 290 | CoPPO III [Kosakonia | S85 | G118 | A119 | R237 | Q256 |
| | radicincitans] | | | | | |
| 291 | CoPPO III [Enterococcus | S85 | G118 | A119 | R237 | Q256 |
| | gallinarum EGD-AAK12] | | | | | |
| 292 | CoPPO III [gamma | S88 | G121 | E122 | R240 | Q259 |
| | proteobacterium WG36] | | | | | |
| 293 | CoPPO III [Shewanella | S86 | G119 | A120 | R238 | Q257 |
| | loihica] | | | | | |
| 294 | CoPPO III [Oceanimonas | S88 | G121 | A122 | R240 | Q259 |
| | smirnovii] | | | | | |
| 295 | CoPPO III [Chromobacterium | R87 | G120 | E121 | R239 | Q258 |
| | piscinae] | | | | | |
| 296 | CoPPO III | R87 | G120 | E121 | R239 | Q258 |
| | [Pseudogulbenkiania | | | | | |
| | ferrooxidans] | | | | | |
| 297 | CoPPO III [Chromobacterium | R87 | G120 | E121 | R239 | Q258 |
| | violaceum] | | | | | |
| 298 | CoPPO III [Aeromonas | R87 | G120 | E121 | R239 | Q258 |
| | hydrophila] | | | | | |
| 299 | CoPPO III [Glaciecola sp. | R92 | G125 | E126 | R244 | Q263 |
| | HTCC2999] | | | | | |
| 300 | CoPPO III [Alteromonas | N91 | G124 | E125 | R243 | Q262 |
| | macleodii] | | | | | |
| 301 | CoPPO III [Gilvimarinus | S87 | G120 | A121 | R239 | Q258 |
| | chinensis] | | | | | |
| 312 | hemJ [Acinetobacter baylyi] | | | | | |
| 313 | hemY [Escherichia coli] | | | | | |

[0358] In a further particularly preferred embodiment, the variant or derivative of the mutated PPO refers to SEQ ID NO: 1, 2, 3, 4, 5, 6, 7, 8, 9, 10, 11, 12, 13, 14, 15, 16, 17, 18, 19, 20, 21, 22, 23, 24, 25, 26, 27, 28, 29, 30, 31, 32, 33, 34, 35, 36, 37, 38, 39, 40, 41, 42, 43, 44, 45, 46, 47, 48, 49, 50, 51, 52, 53, 54, 55, 56, 57, 58, 59, 60, 61, 62, 63, 64, 65, 66, 67, 68, 69, 70, 71, 72, 73, 74, 75, 76, 77, 78, 79, 80, 81, 82, 83, 84, 85, 86, 87, 88, 89, 90, 91, 92, 93, 94, 95, 96, 97, 98, 99, 100, 101, 102, 103, 104, 105, 106, 107, 108, 109, 110, 111, 112, 113, 114, 115, 116, 117, 118, 119, 120, 121, 122, 123, 124, 125, 126, 127, 128, 129, 130, 131, 132, 133, 134, 135, 136, 137, 138, 139, 140, 141, 142, 143, 144, 145, 146, 147, 148, 149, 150, 151, 152, 153, 154, 155, 156, 157, 158, 159, 160, 161, 162, 163, 164, 165, 166, 167, 168, 169, 170, 171, 172, 173, 174, 175, 176, 177, 178, 179, 180, 181, 182, 183, 184, 185, 186, 187, 188, 189, 190, 191, 192, 193, 194, 195, 196, 197, 198, 199, 200, 201, 202, 203, 204, 205, 206, 207, 208, 209, 210, 211, 212, 213, 214, 215, 216, 217, 218, 219, 220, 221, 222, 223, 224, 225, 226, 227, 228, 229, 230, 231, 232, 233, 234, 235, 236, 237, 238, 239, 240, 241, 242, 243, 244, 245, 246, 247, 248, 249, 250, 251, 252, 253, 254, 255, 256, 257, 258, 259, 260, 261, 262, 263, 264, 265, 266, 267, 268, 269, 270, 271, 272, 273, 274, 275, 276, 277, 278, 279, 280, 281, 282, 283, 284, 285, 286, 287, 288, 289, 290, 291, 292, 293, 294, 295, 296, 297, 298, 299, 300, 301, 312, or 313, comprising a single amino acid substitutions at the positions depicted in the following Table 2b.

[0359] It should be noted that Mutated site 1 of Table 2a) corresponds to Pos 1 of Table 2b); Mutated site 2 of Table 2a) corresponds to Pos 15 of Table 2b); Mutated site 3 of Table 2a) corresponds to Pos 16 of Table 2b); Mutated site 4 of Table 2a) corresponds to Pos 38 of Table 2b); Mutated site 5 of Table 2a) corresponds to Pos 42 of Table 2b).

TABLE 2b-1

| ID | Pos 1 | Pos 2 | Pos 3 | Pos 4 | Pos 5 | Pos 6 | Pos 7 | Pos 8 | Pos 9 | Pos 10 | Pos 11 |
|---|---|---|---|---|---|---|---|---|---|---|---|
| 1 | R128 | Y129 | A131 | S149 | I151 | A154 | P164 | K169 | E182 | S183 | E189 |
| 2 | R87 | Y88 | V90 | T108 | L110 | T113 | P123 | — | E133 | S134 | E140 |
| 3 | R87 | F88 | V90 | T108 | L110 | P113 | P123 | — | E134 | S135 | R141 |
| 4 | R87 | Y88 | V90 | T108 | L110 | T113 | P123 | — | E133 | S134 | E140 |
| 5 | R87 | F88 | V90 | T108 | L110 | P113 | P123 | — | E134 | S135 | R141 |
| 6 | R97 | F98 | A100 | S118 | L120 | M123 | A133 | — | E142 | T143 | R149 |
| 7 | R88 | Y89 | V91 | T109 | L111 | I114 | P124 | — | Q135 | S136 | T142 |
| 8 | R94 | F95 | M97 | T115 | L117 | L120 | P130 | — | E139 | S140 | I146 |
| 9 | R103 | Y104 | V106 | S124 | L126 | P129 | L139 | — | V150 | S151 | E157 |
| 10 | R88 | Y89 | L91 | T109 | L111 | S114 | P124 | — | Q135 | S136 | R142 |
| 11 | R83 | Y84 | V86 | T104 | L106 | A109 | P119 | R124 | E137 | N138 | T144 |
| 12 | R99 | Y100 | V102 | S120 | I122 | A125 | P135 | K140 | E153 | S154 | Q160 |
| 13 | R103 | Y104 | A106 | N124 | L126 | L129 | P139 | — | E149 | S150 | V156 |
| 14 | R92 | Y93 | V95 | T113 | L115 | W118 | — | — | E139 | T140 | R146 |
| 15 | R97 | Y98 | V100 | T118 | L120 | A123 | P133 | — | E147 | S148 | E154 |
| 16 | R97 | Y98 | V100 | T118 | L120 | A123 | P133 | — | E147 | S148 | E154 |
| 17 | R101 | Y102 | V104 | S122 | V124 | T127 | P137 | K142 | E154 | S155 | Q161 |
| 18 | R89 | F90 | L92 | S109 | L111 | L114 | P124 | — | E136 | S137 | R143 |
| 19 | R103 | Y104 | V106 | S124 | V126 | T129 | P139 | K144 | E158 | S159 | Q165 |
| 20 | R98 | Y99 | V101 | S119 | L121 | A124 | P134 | R139 | E152 | S153 | E159 |
| 21 | R91 | F92 | L94 | T112 | L114 | W117 | P127 | — | E138 | S139 | T145 |
| 22 | R98 | Y99 | V101 | S119 | L121 | A124 | P134 | R139 | E152 | S153 | E159 |
| 23 | R92 | Y93 | L95 | T113 | L115 | W118 | P128 | — | E139 | S140 | S146 |
| 24 | R100 | Y101 | V103 | S121 | I123 | A126 | P136 | K141 | E154 | S155 | Q161 |
| 25 | R130 | Y131 | V133 | S151 | V153 | T156 | P166 | K171 | E187 | S188 | E194 |
| 26 | R101 | Y102 | V104 | — | — | — | — | — | E124 | S125 | Q131 |
| 27 | R84 | Y85 | Y87 | S105 | F107 | L110 | P120 | — | E130 | S131 | R137 |
| 28 | R86 | F87 | Y89 | S107 | L109 | W112 | L122 | — | E132 | T133 | R139 |
| 29 | R88 | Y89 | L91 | T109 | L111 | A114 | P124 | — | Q135 | S136 | R142 |
| 30 | R130 | Y131 | V133 | S151 | V153 | T156 | P166 | K171 | E187 | S188 | E194 |
| 31 | R86 | F87 | Y89 | S107 | L109 | W112 | F122 | — | E133 | S134 | K140 |
| 32 | R87 | Y88 | L90 | G107 | L109 | W112 | P122 | — | E134 | S135 | R141 |
| 33 | — | Y85 | Y87 | S105 | L107 | L110 | P120 | — | E130 | T131 | R137 |
| 34 | R84 | F85 | L87 | G105 | Q107 | A110 | P120 | — | E131 | T132 | R138 |
| 35 | R87 | Y88 | L90 | G107 | L109 | I112 | P122 | — | E134 | S135 | R141 |
| 36 | R92 | Y93 | M95 | S113 | L115 | F118 | L128 | — | E139 | T140 | Y146 |
| 37 | R93 | F94 | Y96 | S114 | L116 | W119 | P131 | — | E142 | T143 | R149 |
| 38 | R89 | Y90 | L92 | T110 | L112 | F115 | Y125 | — | E136 | T137 | S143 |
| 39 | R93 | F94 | Y96 | S114 | L116 | W119 | P129 | — | E140 | T141 | R147 |
| 40 | R93 | F94 | Y96 | S114 | L116 | W119 | P129 | — | E140 | T141 | R147 |
| 41 | R86 | Y87 | Y89 | T107 | L109 | L112 | I122 | — | I131 | S132 | R138 |
| 42 | R92 | F93 | F95 | S113 | L115 | W118 | L128 | — | E139 | T140 | R146 |
| 43 | R93 | F94 | Y96 | S114 | L116 | W119 | P129 | — | E140 | T141 | R147 |
| 44 | R84 | F85 | Y87 | G105 | F107 | A110 | L120 | — | E130 | T131 | A137 |
| 45 | R93 | F94 | Y96 | S114 | L116 | W119 | P131 | — | E142 | T143 | R149 |
| 46 | R86 | L87 | W89 | T107 | L109 | L112 | P122 | — | E132 | T133 | R139 |
| 47 | R86 | Y87 | F89 | S107 | I109 | L112 | L122 | — | E133 | S134 | R140 |
| 48 | R92 | Y93 | M95 | T113 | L115 | F118 | Y128 | — | E138 | S139 | R145 |
| 49 | R86 | L87 | W89 | T107 | L109 | L112 | P122 | — | E132 | T133 | R139 |
| 50 | R87 | S88 | Y90 | S108 | L110 | L113 | L123 | — | E134 | S135 | R141 |
| 51 | R86 | L87 | W89 | T107 | L109 | L112 | P122 | — | E132 | T133 | R139 |
| 52 | R93 | Y94 | W96 | T114 | L116 | L119 | F129 | — | E143 | T144 | R150 |
| 53 | R92 | F93 | F95 | G113 | F115 | W118 | R128 | — | E138 | T139 | R145 |
| 54 | T101 | F102 | V104 | S130 | L132 | W135 | L145 | — | E156 | S157 | R163 |
| 55 | R93 | F94 | Y96 | S114 | L116 | W119 | P131 | — | E142 | S143 | R149 |
| 56 | R86 | Y87 | Y89 | T107 | L109 | L112 | I122 | — | I131 | S132 | R138 |
| 57 | T101 | F102 | V104 | S130 | L132 | W135 | L145 | — | E156 | S157 | R163 |
| 58 | R88 | Y89 | V91 | S109 | L111 | W114 | P124 | — | E133 | S134 | R140 |
| 59 | R92 | Y93 | V95 | T113 | L115 | W118 | — | — | E139 | T140 | R146 |
| 60 | R74 | Y75 | V77 | S95 | F97 | T100 | P110 | — | E123 | S124 | Q130 |
| 61 | R128 | Y129 | A131 | S149 | I151 | A154 | P164 | K169 | E182 | S183 | E189 |
| 62 | R96 | Y97 | V99 | S117 | F119 | P122 | P132 | R137 | E150 | S151 | G157 |
| 63 | R96 | Y97 | V99 | S117 | F119 | A122 | P132 | R137 | E150 | S151 | G157 |
| 64 | R95 | Y96 | A98 | S116 | F118 | T121 | P131 | N136 | E147 | S148 | Q154 |
| 65 | R92 | F93 | L95 | T113 | I115 | L118 | P128 | — | E144 | T145 | R151 |
| 66 | R130 | Y131 | V133 | S151 | V153 | T156 | P166 | K171 | E187 | S188 | E194 |
| 67 | R95 | Y96 | V98 | S116 | V118 | T121 | P131 | K136 | E152 | S153 | E159 |
| 68 | R128 | Y129 | V131 | S149 | V151 | T154 | P164 | K169 | E185 | S186 | E192 |
| 69 | R97 | Y98 | V100 | S118 | V120 | T123 | P133 | K138 | E154 | S155 | E161 |
| 70 | R139 | Y140 | V142 | S160 | V162 | T165 | P175 | K180 | E196 | S197 | E203 |
| 71 | R100 | Y101 | V103 | S121 | T123 | A126 | P136 | H141 | E158 | S159 | R165 |
| 72 | R95 | Y96 | V98 | S116 | V118 | T121 | P131 | K136 | E152 | S153 | C158 |
| 73 | R86 | L87 | W89 | T107 | L109 | L112 | P122 | — | E132 | T133 | R139 |
| 74 | R95 | Y96 | V98 | S116 | V118 | T121 | P131 | K136 | E152 | S153 | C169 |
| 75 | R87 | Y88 | V90 | T108 | L110 | T113 | P123 | A128 | — | S134 | E140 |
| 76 | R87 | F88 | V90 | T108 | L110 | P113 | P123 | A128 | E134 | S135 | R141 |
| 77 | E104 | I105 | Y107 | H115 | F117 | E120 | E128 | N133 | K139 | S140 | M146 |
| 78 | K82 | M83 | Y85 | N93 | L95 | D98 | S105 | I110 | L116 | S117 | L123 |
| 79 | N98 | I99 | F101 | E118 | I120 | W123 | — | S139 | L145 | S146 | L152 |
| 80 | P257 | F258 | E260 | A283 | P285 | T288 | G301 | N306 | L319 | R320 | I326 |
| 81 | R144 | F145 | Y147 | E172 | V174 | T177 | F187 | D192 | E198 | S199 | S205 |
| 82 | R77 | Y78 | F80 | K105 | W107 | Y110 | N120 | L125 | E133 | S134 | C140 |
| 83 | K104 | Y105 | H107 | S127 | L129 | C132 | M142 | R147 | E153 | S154 | C160 |
| 84 | — | — | — | — | I16 | V19 | — | L32 | H45 | R46 | E52 |
| 85 | — | — | — | — | I16 | V19 | — | L32 | H45 | R46 | E52 |
| 86 | — | — | — | — | I16 | V19 | — | L32 | H45 | R46 | E52 |
| 87 | — | — | — | — | I16 | V19 | — | L32 | H45 | Q46 | E52 |
| 88 | — | — | — | — | I16 | V19 | — | L32 | H45 | Q46 | E52 |
| 89 | — | — | — | — | I16 | V19 | — | L32 | H45 | Q46 | E52 |
| 90 | — | — | — | — | I16 | V19 | — | L32 | H45 | Q46 | E52 |
| 91 | — | — | — | — | I16 | V19 | — | L32 | H45 | Q46 | E52 |
| 92 | — | — | — | — | I16 | V19 | — | L32 | H45 | Q46 | E52 |
| 93 | — | — | — | — | I16 | V19 | — | L32 | H45 | Q46 | E52 |
| 94 | — | — | — | — | I16 | V19 | — | L32 | H45 | Q46 | E52 |
| 95 | — | — | — | — | I16 | V19 | — | L32 | H45 | Q46 | E52 |
| 96 | — | — | — | — | I16 | V19 | — | L32 | H45 | Q46 | E52 |
| 97 | — | — | — | — | I16 | V19 | — | L32 | H45 | Q46 | E52 |
| 98 | — | — | — | — | I16 | V19 | — | L32 | H45 | Q46 | E52 |
| 99 | — | — | — | — | I16 | V19 | — | L32 | H45 | Q46 | E52 |
| 100 | — | — | — | — | I16 | V19 | — | L32 | H45 | Q46 | E52 |
| 101 | — | — | — | — | I16 | V19 | — | L32 | H45 | Q46 | E52 |
| 102 | — | — | — | — | I16 | V19 | — | L32 | H45 | Q46 | E52 |
| 103 | — | — | — | — | I16 | V19 | — | L32 | H45 | Q46 | E52 |
| 104 | — | — | — | — | I16 | V19 | — | L32 | H45 | Q46 | E52 |
| 105 | — | — | — | — | I16 | V19 | — | L32 | H45 | Q46 | E52 |
| 106 | — | — | — | — | I16 | V19 | — | L32 | H45 | Q46 | E52 |
| 107 | — | — | — | — | I16 | V19 | — | L32 | H45 | Q46 | E52 |
| 108 | — | — | — | — | I16 | V19 | — | L32 | H45 | Q46 | E52 |
| 109 | — | — | — | — | I16 | V19 | — | L32 | H45 | Q46 | E52 |
| 110 | — | — | — | — | I16 | V19 | — | L32 | H45 | Q46 | E52 |
| 111 | — | — | — | — | I16 | V19 | — | L32 | H45 | Q46 | E52 |
| 112 | — | — | — | — | I16 | V19 | — | L32 | H45 | Q46 | E52 |
| 113 | — | — | — | — | I16 | V19 | — | L32 | H45 | Q46 | E52 |
| 114 | — | — | — | — | I16 | V19 | — | L32 | H45 | Q46 | E52 |
| 115 | — | — | — | — | I16 | V19 | — | L32 | H45 | Q46 | E52 |
| 116 | — | — | — | — | I16 | V19 | — | L32 | H45 | Q46 | E52 |
| 117 | — | — | — | — | I16 | V19 | — | L32 | H45 | Q46 | E52 |
| 118 | — | — | — | — | I16 | V19 | — | L32 | H45 | Q46 | E52 |
| 119 | — | — | — | — | I16 | V19 | — | L32 | H45 | Q46 | E52 |
| 120 | — | — | — | — | I16 | V19 | — | L32 | H45 | Q46 | E52 |
| 121 | — | — | — | — | I16 | V19 | — | L32 | H45 | Q46 | E52 |
| 122 | — | — | — | — | I16 | V19 | — | L32 | H45 | H46 | E52 |
| 123 | — | — | — | — | I16 | V19 | — | L32 | H45 | Q46 | E52 |
| 124 | — | — | — | — | I16 | V19 | — | L32 | H45 | Q46 | E52 |
| 125 | — | — | — | — | I16 | V19 | — | L32 | H45 | Q46 | E52 |
| 126 | — | — | — | — | I16 | V19 | — | L32 | H45 | Q46 | E52 |
| 127 | — | — | — | — | I16 | V19 | — | L32 | H45 | Q46 | E52 |
| 128 | — | — | — | — | I16 | V19 | — | L32 | H45 | Q46 | E52 |
| 129 | — | — | — | — | I16 | V19 | — | L32 | H45 | Q46 | E52 |
| 130 | — | — | — | — | I16 | V19 | — | L32 | H45 | Q46 | E52 |
| 131 | — | — | — | — | I16 | V19 | — | L32 | H45 | Q46 | E52 |
| 132 | — | — | — | — | I16 | V19 | — | L32 | H45 | Q46 | E52 |
| 133 | — | — | — | — | I16 | V19 | — | L32 | H45 | Q46 | E52 |
| 134 | — | — | — | — | I16 | V19 | — | L32 | H45 | Q46 | E52 |
| 135 | — | — | — | — | I16 | V19 | — | L32 | H45 | Q46 | E52 |
| 136 | — | — | — | — | I16 | V19 | — | L32 | H45 | Q46 | E52 |
| 137 | — | — | — | — | I16 | V19 | — | L32 | H45 | Q46 | E52 |
| 138 | — | — | — | — | I16 | V19 | — | L32 | H45 | Q46 | E52 |
| 139 | — | — | — | — | I16 | V19 | — | L32 | H45 | Q46 | E52 |
| 140 | — | — | — | — | I16 | V19 | — | L32 | H45 | Q46 | E52 |
| 141 | — | — | — | — | I16 | V19 | — | L32 | H45 | Q46 | E52 |
| 142 | — | — | — | — | I16 | V19 | — | L32 | H45 | Q46 | E52 |
| 143 | — | — | — | — | I16 | V19 | — | L32 | H45 | Q46 | E52 |
| 144 | — | — | — | — | I16 | V19 | — | L32 | H45 | Q46 | E52 |
| 145 | — | — | — | — | I16 | V19 | — | L32 | H45 | Q46 | E52 |
| 146 | — | — | — | — | I16 | V19 | — | L32 | H45 | Q46 | E52 |
| 147 | — | — | — | — | I16 | V19 | — | L32 | H45 | Q46 | E52 |
| 148 | — | — | — | — | I16 | V19 | — | L32 | H45 | Q46 | E52 |
| 149 | — | — | — | — | I16 | V19 | — | L32 | H45 | Q46 | E52 |
| 150 | — | — | — | — | I16 | V19 | — | L32 | H45 | Q46 | E52 |
| 151 | — | — | — | — | I16 | V19 | — | L32 | H45 | Q46 | E52 |
| 152 | — | — | — | — | I16 | V19 | — | L32 | H45 | Q46 | E52 |
| 153 | — | — | — | — | I16 | V19 | — | L32 | H45 | Q46 | E52 |
| 154 | — | — | — | — | I16 | V19 | — | L32 | H45 | Q46 | E52 |
| 155 | — | — | — | — | I16 | V19 | — | L32 | H45 | Q46 | E52 |
| 156 | — | — | — | — | I16 | V19 | — | L32 | H45 | Q46 | E52 |
| 157 | — | — | — | — | I16 | V19 | — | L32 | H45 | E46 | E52 |
| 158 | — | — | — | — | I16 | V19 | — | L32 | H45 | Q46 | E52 |
| 159 | — | — | — | — | I16 | V19 | — | L32 | H45 | Q46 | E52 |
| 160 | — | — | — | — | I16 | V19 | — | L32 | H45 | Q46 | E52 |
| 161 | — | — | — | — | I16 | V19 | — | L32 | H45 | Q46 | E52 |
| 162 | — | — | — | — | I16 | V19 | — | L32 | H45 | Q46 | E52 |
| 163 | — | — | — | — | I16 | V19 | — | L32 | H45 | Q46 | E52 |
| 164 | — | — | — | — | I16 | V19 | — | L32 | H45 | Q46 | E52 |
| 165 | — | — | — | — | I16 | V19 | — | L32 | H45 | Q46 | E52 |
| 166 | — | — | — | — | I16 | V19 | — | L32 | H45 | Q46 | E52 |
| 167 | — | — | — | — | I16 | V19 | — | L32 | H45 | Q46 | E52 |
| 168 | — | — | — | — | I16 | V19 | — | L32 | H45 | Q46 | E52 |
| 169 | — | — | — | — | I16 | V19 | — | L32 | H45 | A46 | E52 |
| 170 | — | — | — | — | I16 | V19 | — | L32 | H45 | Q46 | E52 |
| 171 | — | — | — | — | I16 | V19 | — | L32 | H45 | Q46 | E52 |
| 172 | — | — | — | — | I16 | V19 | — | L32 | Y45 | E46 | E52 |
| 173 | — | — | — | — | I16 | V19 | — | L32 | H45 | Q46 | E52 |
| 174 | — | — | — | — | I16 | V19 | — | L32 | H45 | Q46 | E52 |
| 175 | — | — | — | — | I8 | V11 | — | L24 | H37 | Q38 | E44 |
| 176 | — | — | — | — | I16 | V19 | — | L32 | H45 | Q46 | E52 |
| 177 | — | — | — | — | I16 | V19 | — | L32 | H45 | Q46 | E52 |
| 178 | — | — | — | — | I16 | V19 | — | L32 | H45 | Q46 | E52 |
| 179 | — | — | — | — | I16 | V19 | — | L32 | H45 | Q46 | E52 |
| 180 | — | — | — | — | I14 | V17 | — | L30 | H43 | Q44 | E50 |
| 181 | — | — | — | — | I16 | V19 | — | L32 | H45 | Q46 | E52 |
| 182 | — | — | — | — | I16 | V19 | — | L32 | H45 | Q46 | E52 |
| 183 | — | — | — | — | I16 | I19 | — | L32 | H45 | Q46 | E52 |
| 184 | — | — | — | — | — | — | — | — | — | — | — |
| 185 | — | — | — | — | — | — | — | — | — | — | — |
| 186 | — | — | — | — | — | — | — | — | — | — | — |
| 187 | — | — | — | — | — | — | — | — | — | — | — |
| 188 | — | — | — | — | — | — | — | — | — | — | — |
| 189 | — | — | — | — | — | — | — | — | — | — | — |
| 190 | — | — | — | — | — | — | — | — | — | — | — |
| 191 | — | — | — | — | — | — | — | — | — | — | — |
| 192 | — | — | — | — | — | — | — | — | — | — | — |
| 193 | — | — | — | — | — | — | — | — | — | — | — |
| 194 | — | — | — | — | — | — | — | — | — | — | — |
| 195 | — | — | — | — | — | — | — | — | — | — | — |
| 196 | — | — | — | — | — | — | — | — | — | — | — |
| 197 | — | — | — | — | — | — | — | — | — | — | — |
| 198 | — | — | — | — | — | — | — | — | — | — | — |
| 199 | — | — | — | — | — | — | — | — | — | — | — |
| 200 | — | — | — | — | — | — | — | — | — | — | — |
| 201 | — | — | — | — | — | — | — | — | — | — | — |
| 202 | — | — | — | — | — | — | — | — | — | — | — |
| 203 | — | — | — | — | — | — | — | — | — | — | — |
| 204 | — | — | — | — | — | — | — | — | — | — | — |
| 205 | — | — | — | — | — | — | — | — | — | — | — |
| 206 | — | — | — | — | — | — | — | — | — | — | — |
| 207 | — | — | — | — | — | — | — | — | — | — | — |
| 208 | — | — | — | — | — | — | — | — | — | — | — |
| 209 | — | — | — | — | — | — | — | — | — | — | — |
| 210 | — | — | — | — | — | — | — | — | — | — | — |
| 211 | — | — | — | — | — | — | — | — | — | — | — |
| 212 | — | — | — | — | — | — | — | — | — | — | — |
| 213 | — | — | — | — | — | — | — | — | — | — | — |
| 214 | — | — | — | — | — | — | — | — | — | — | — |
| 215 | — | — | — | — | — | — | — | — | — | — | — |
| 216 | — | — | — | — | — | — | — | — | — | — | — |
| 217 | — | — | — | — | — | — | — | — | — | — | — |
| 218 | — | — | — | — | — | — | — | — | — | — | — |
| 219 | — | — | — | — | — | — | — | — | — | — | — |
| 220 | — | — | — | — | — | — | — | — | — | — | — |
| 221 | — | — | — | — | — | — | — | — | — | — | — |
| 222 | — | — | — | — | — | — | — | — | — | — | — |
| 223 | — | — | — | — | — | — | — | — | — | — | — |
| 224 | — | — | — | — | — | — | — | — | — | — | — |
| 225 | — | — | — | — | — | — | — | — | — | — | — |
| 226 | — | — | — | — | — | — | — | — | — | — | — |
| 227 | — | — | — | — | — | — | — | — | — | — | — |
| 228 | — | — | — | — | — | — | — | — | — | — | — |
| 229 | — | — | — | — | — | — | — | — | — | — | — |
| 230 | — | — | — | — | — | — | — | — | — | — | — |
| 231 | — | — | — | — | — | — | — | — | — | — | — |
| 232 | — | — | — | — | — | — | — | — | — | — | — |
| 233 | — | — | — | — | — | — | — | — | — | — | — |
| 234 | — | — | — | — | — | — | — | — | — | — | — |
| 235 | — | — | — | — | — | — | — | — | — | — | — |
| 236 | — | — | — | — | — | — | — | — | — | — | — |
| 237 | — | — | — | — | — | — | — | — | — | — | — |
| 238 | — | — | — | — | — | — | — | — | — | — | — |
| 239 | — | — | — | — | — | — | — | — | — | — | — |
| 240 | — | — | — | — | — | — | — | — | — | — | — |
| 241 | — | — | — | — | — | — | — | — | — | — | — |
| 242 | — | — | — | — | — | — | — | — | — | — | — |
| 243 | — | — | — | — | — | — | — | — | — | — | — |
| 244 | — | — | — | — | — | — | — | — | — | — | — |
| 245 | — | — | — | — | — | — | — | — | — | — | — |
| 246 | — | — | — | — | — | — | — | — | — | — | — |
| 247 | — | — | — | — | — | — | — | — | — | — | — |
| 248 | — | — | — | — | — | — | — | — | — | — | — |
| 249 | — | — | — | — | — | — | — | — | — | — | — |
| 250 | — | — | — | — | — | — | — | — | — | — | — |
| 251 | — | — | — | — | — | — | — | — | — | — | — |
| 252 | — | — | — | — | — | — | — | — | — | — | — |
| 253 | — | — | — | — | — | — | — | — | — | — | — |
| 254 | — | — | — | — | — | — | — | — | — | — | — |
| 255 | — | — | — | — | — | — | — | — | — | — | — |
| 256 | — | — | — | — | — | — | — | — | — | — | — |
| 257 | — | — | — | — | — | — | — | — | — | — | — |
| 258 | — | — | — | — | — | — | — | — | — | — | — |
| 259 | — | — | — | — | — | — | — | — | — | — | — |
| 260 | — | — | — | — | — | — | — | — | — | — | — |
| 261 | — | — | — | — | — | — | — | — | — | — | — |
| 262 | — | — | — | — | — | — | — | — | — | — | — |
| 263 | — | — | — | — | — | — | — | — | — | — | — |
| 264 | — | — | — | — | — | — | — | — | — | — | — |
| 265 | — | — | — | — | — | — | — | — | — | — | — |
| 266 | — | — | — | — | — | — | — | — | — | — | — |
| 267 | — | — | — | — | — | — | — | — | — | — | — |
| 268 | — | — | — | — | — | — | — | — | — | — | — |
| 269 | — | — | — | — | — | — | — | — | — | — | — |
| 270 | — | — | — | — | — | — | — | — | — | — | — |
| 271 | — | — | — | — | — | — | — | — | — | — | — |
| 272 | — | — | — | — | — | — | — | — | — | — | — |
| 273 | — | — | — | — | — | — | — | — | — | — | — |
| 274 | — | — | — | — | — | — | — | — | — | — | — |
| 275 | S85 | F86 | A88 | — | — | — | P100 | S105 | — | — | — |
| 276 | S85 | F86 | A88 | — | — | — | P100 | S105 | — | — | — |
| 277 | S85 | F86 | A88 | — | — | — | P100 | S105 | — | — | — |
| 278 | S85 | F86 | A88 | — | — | — | P100 | S105 | — | — | — |
| 279 | S85 | F86 | A88 | — | — | — | P100 | S105 | — | — | — |
| 280 | S85 | F86 | A88 | — | — | — | P100 | S105 | — | — | — |
| 281 | S85 | F86 | A88 | — | — | — | P100 | S105 | — | — | — |
| 282 | S85 | F86 | A88 | — | — | — | P100 | S105 | — | — | — |
| 283 | S85 | F86 | A88 | — | — | — | P100 | S105 | — | — | — |
| 284 | S85 | F86 | A88 | — | — | — | P100 | S105 | — | — | — |
| 285 | S85 | F86 | A88 | — | — | — | P100 | S105 | — | — | — |
| 286 | S85 | F86 | A88 | — | — | — | P100 | S105 | — | — | — |
| 287 | S85 | F86 | A88 | — | — | — | P100 | S105 | — | — | — |
| 288 | S85 | F86 | A88 | — | — | — | P100 | S105 | — | — | — |
| 289 | S85 | F86 | A88 | — | — | — | P100 | S105 | — | — | — |
| 290 | S85 | F86 | A88 | — | — | — | P100 | S105 | — | — | — |
| 291 | S85 | F86 | A88 | — | — | — | P100 | S105 | — | — | — |
| 292 | S88 | F89 | A91 | — | — | — | P103 | S108 | — | — | — |
| 293 | S86 | F87 | A89 | — | — | — | P101 | T106 | — | — | — |
| 294 | S88 | F89 | A91 | — | — | — | P103 | S108 | — | — | — |
| 295 | R87 | F88 | A90 | — | — | — | P102 | S107 | — | — | — |
| 296 | R87 | F88 | A90 | — | — | — | P102 | S107 | — | — | — |
| 297 | R87 | F88 | A90 | — | — | — | P102 | S107 | — | — | — |
| 298 | R87 | F88 | A90 | — | — | — | P102 | S107 | — | — | — |
| 299 | R92 | F93 | A95 | — | — | — | P107 | S112 | — | — | — |
| 300 | N91 | F92 | A94 | — | — | — | P106 | S111 | — | — | — |
| 301 | S87 | F88 | A90 | — | — | — | P102 | S107 | — | — | — |

| ID | Pos 12 | Pos 13 | Pos 14 | Pos 15 | Pos 16 | Pos 17 | Pos 18 | Pos 19 | Pos 20 |
|---|---|---|---|---|---|---|---|---|---|
| 1 | F196 | D202 | C209 | G210 | G211 | L216 | M218 | H219 | H220 |
| 2 | V147 | A153 | F160 | A161 | G162 | L167 | V169 | Q170 | H171 |
| 3 | V148 | E154 | F161 | A162 | G163 | L168 | V170 | R171 | Y172 |
| 4 | V147 | A153 | F160 | A161 | G162 | L167 | V169 | Q170 | H171 |
| 5 | V148 | E154 | F161 | A162 | G163 | L168 | V170 | R171 | Y172 |
| 6 | F156 | D162 | Y169 | A170 | G171 | L176 | V178 | Q179 | A180 |
| 7 | L149 | N155 | Y162 | A163 | G164 | L169 | L171 | R172 | Y173 |
| 8 | F153 | E159 | Y166 | A167 | G168 | L173 | V175 | R176 | A177 |
| 9 | F164 | N170 | Y177 | A178 | G179 | L184 | A186 | R187 | Q188 |
| 10 | F149 | D155 | F162 | A163 | G164 | L169 | V171 | K172 | S173 |
| 11 | V151 | D157 | S164 | G165 | S166 | V171 | I173 | R174 | H175 |
| 12 | V167 | D173 | S180 | A181 | G182 | L187 | V189 | C190 | H191 |
| 13 | V163 | D169 | Y176 | A177 | G178 | L183 | A185 | Q186 | A187 |
| 14 | A153 | D159 | Y166 | A167 | S168 | L173 | V175 | E176 | A177 |
| 15 | I161 | D167 | S174 | G175 | S176 | I181 | I183 | R184 | H185 |
| 16 | I161 | D167 | S174 | G175 | S176 | I181 | I183 | R184 | H185 |
| 17 | V168 | D174 | S181 | A182 | A183 | L188 | M190 | K191 | H192 |
| 18 | A150 | D156 | F163 | A164 | G165 | L170 | V172 | T173 | A174 |
| 19 | V172 | D178 | S185 | A186 | A187 | L192 | M194 | K195 | H196 |
| 20 | V166 | D172 | S179 | A180 | A181 | L186 | M188 | R189 | H190 |
| 21 | A152 | D158 | Y165 | A166 | G167 | L172 | T174 | A175 | A176 |
| 22 | V166 | D172 | S179 | A180 | A181 | L186 | I188 | R189 | H190 |
| 23 | A153 | D159 | Y166 | A167 | G168 | L173 | A175 | A176 | A177 |
| 24 | V168 | D174 | S181 | G182 | G183 | L188 | M190 | H191 | H192 |
| 25 | V201 | D207 | S214 | A215 | G216 | L221 | I223 | R224 | H225 |
| 26 | V138 | D144 | S151 | A152 | A153 | L158 | M160 | K161 | H162 |
| 27 | F144 | A150 | Y157 | A158 | G159 | L164 | V166 | K167 | Y168 |
| 28 | A146 | D152 | F159 | A160 | G161 | M166 | L168 | K169 | A170 |
| 29 | F149 | N155 | Y162 | A163 | G164 | L169 | V171 | K172 | S173 |
| 30 | V201 | D207 | S214 | A215 | G216 | L221 | I223 | C224 | H225 |
| 31 | A147 | D153 | F160 | A161 | G162 | L167 | L169 | K170 | A171 |
| 32 | A148 | D154 | F161 | A162 | G163 | L168 | V170 | Q171 | A172 |
| 33 | F144 | T150 | Y157 | A158 | G159 | L164 | I166 | K167 | Y168 |
| 34 | F145 | S151 | F158 | A159 | G160 | L165 | A167 | G168 | L169 |
| 35 | A148 | D154 | F161 | A162 | G163 | L168 | V170 | Q171 | A172 |
| 36 | A153 | S159 | F166 | A167 | G168 | L173 | L175 | K176 | S177 |
| 37 | A156 | A162 | F169 | A170 | G171 | M176 | L178 | V179 | S180 |
| 38 | F150 | D156 | Y163 | A164 | G165 | M170 | M172 | K173 | S174 |
| 39 | A154 | A160 | F167 | A168 | G169 | M174 | L176 | R177 | S178 |
| 40 | A154 | A160 | F167 | A168 | G169 | M174 | L176 | R177 | S178 |
| 41 | F145 | A151 | Y158 | A159 | G160 | L165 | L167 | K168 | H169 |
| 42 | A153 | G159 | F166 | A167 | G168 | M173 | L175 | R176 | S177 |
| 43 | A154 | S160 | F167 | A168 | G169 | M174 | L176 | R177 | S178 |
| 44 | F144 | D150 | Y157 | A158 | G159 | L164 | I166 | E167 | E168 |
| 45 | A156 | A162 | F169 | A170 | G171 | M176 | L178 | Q179 | S180 |
| 46 | F146 | D152 | Y159 | A160 | G161 | L166 | T168 | R169 | F170 |
| 47 | A147 | D153 | Y160 | A161 | G162 | L167 | A169 | E170 | A171 |
| 48 | A152 | S158 | F165 | A166 | G167 | M172 | L174 | R175 | S176 |
| 49 | F146 | D152 | Y159 | A160 | G161 | L166 | T168 | R169 | F170 |
| 50 | A148 | D154 | Y161 | A162 | G163 | L168 | A170 | E171 | A172 |
| 51 | F146 | D152 | Y159 | A160 | G161 | L166 | T168 | R169 | F170 |
| 52 | F157 | D163 | Y170 | A171 | S172 | L177 | L179 | N180 | S181 |
| 53 | I152 | G158 | Y165 | A166 | G167 | L172 | V174 | S175 | E176 |
| 54 | F170 | Q176 | Y183 | G184 | A185 | L190 | L192 | R193 | A194 |
| 55 | A156 | S162 | F169 | A170 | G171 | M176 | L178 | V179 | S180 |
| 56 | F145 | A151 | Y158 | A159 | G160 | L165 | L167 | K168 | H169 |
| 57 | F170 | Q176 | Y183 | G184 | A185 | L190 | L192 | R193 | A194 |
| 58 | F147 | N153 | Y160 | A161 | G162 | L167 | V169 | R170 | F171 |
| 59 | A153 | D159 | Y166 | A167 | S168 | L173 | V175 | E176 | A177 |
| 60 | V137 | D143 | S150 | G151 | G152 | L157 | M159 | R160 | H161 |
| 61 | F196 | D202 | C209 | G210 | G211 | L216 | V218 | H219 | H220 |
| 62 | F164 | D170 | S177 | A178 | A179 | I184 | M186 | R187 | H188 |
| 63 | F164 | D170 | S177 | A178 | A179 | I184 | M186 | R187 | H188 |
| 64 | V161 | D167 | C174 | G175 | G176 | L181 | M183 | H184 | L185 |
| 65 | F158 | D164 | Y171 | A172 | S173 | L178 | M180 | A181 | D182 |
| 66 | V201 | D207 | S214 | A215 | G216 | L221 | I223 | R224 | H225 |
| 67 | V166 | D172 | S179 | G180 | G181 | L186 | I188 | R189 | H190 |
| 68 | V199 | D205 | S212 | A213 | G214 | L219 | I221 | R222 | H223 |
| 69 | V168 | D174 | S181 | A182 | G183 | L188 | I190 | R191 | H192 |
| 70 | V210 | D216 | S223 | G224 | G225 | L230 | I232 | R233 | H234 |
| 71 | V172 | D178 | A185 | G186 | A187 | L192 | I194 | R195 | H196 |
| 72 | V165 | D171 | S178 | G179 | G180 | L185 | I187 | R188 | H189 |
| 73 | F146 | D152 | Y159 | A160 | G161 | L166 | T168 | R169 | F170 |
| 74 | V176 | D182 | S189 | G190 | G191 | L196 | I198 | R199 | H200 |
| 75 | V147 | A153 | F160 | A161 | G162 | L167 | V169 | Q170 | H171 |
| 76 | V148 | E154 | F161 | A162 | G163 | L168 | V170 | R171 | Y172 |
| 77 | L153 | — | Y157 | K158 | S159 | L164 | L171 | H172 | F173 |
| 78 | I130 | — | Y134 | K135 | N136 | F141 | L148 | T149 | F150 |
| 79 | L159 | S165 | — | — | — | L170 | A172 | L173 | H174 |
| 80 | F333 | R339 | Y346 | G347 | A348 | I353 | T360 | Q361 | R362 |
| 81 | M212 | S218 | Y225 | A226 | G227 | L232 | A234 | K235 | S236 |
| 82 | F147 | S153 | C160 | G161 | G162 | M167 | V169 | K170 | F171 |
| 83 | F167 | S173 | F180 | A181 | A182 | L187 | V189 | R190 | A191 |
| 84 | I59 | — | — | — | — | — | — | — | — |
| 85 | I59 | — | — | — | — | — | — | — | — |
| 86 | I59 | — | — | — | — | — | — | — | — |
| 87 | I59 | — | — | — | — | — | — | — | — |
| 88 | I59 | — | — | — | — | — | — | — | — |
| 89 | I59 | — | — | — | — | — | — | — | — |
| 90 | I59 | — | — | — | — | — | — | — | — |
| 91 | I59 | — | — | — | — | — | — | — | — |
| 92 | I59 | — | — | — | — | — | — | — | — |
| 93 | I59 | — | — | — | — | — | — | — | — |
| 94 | I59 | — | — | — | — | — | — | — | — |
| 95 | I59 | — | — | — | — | — | — | — | — |
| 96 | I59 | — | — | — | — | — | — | — | — |
| 97 | I59 | — | — | — | — | — | — | — | — |
| 98 | I59 | — | — | — | — | — | — | — | — |
| 99 | I59 | — | — | — | — | — | — | — | — |
| 100 | I59 | — | — | — | — | — | — | — | — |
| 101 | I59 | — | — | — | — | — | — | — | — |
| 102 | I59 | — | — | — | — | — | — | — | — |
| 103 | I59 | — | — | — | — | — | — | — | — |
| 104 | I59 | — | — | — | — | — | — | — | — |
| 105 | I59 | — | — | — | — | — | — | — | — |
| 106 | I59 | — | — | — | — | — | — | — | — |
| 107 | I59 | — | — | — | — | — | — | — | — |
| 108 | I59 | — | — | — | — | — | — | — | — |
| 109 | I59 | — | — | — | — | — | — | — | — |
| 110 | I59 | — | — | — | — | — | — | — | — |
| 111 | I59 | — | — | — | — | — | — | — | — |
| 112 | I59 | — | — | — | — | — | — | — | — |
| 113 | I59 | — | — | — | — | — | — | — | — |
| 114 | I59 | — | — | — | — | — | — | — | — |
| 115 | I59 | — | — | — | — | — | — | — | — |
| 116 | I59 | — | — | — | — | — | — | — | — |
| 117 | I59 | — | — | — | — | — | — | — | — |
| 118 | I59 | — | — | — | — | — | — | — | — |
| 119 | I59 | — | — | — | — | — | — | — | — |
| 120 | I59 | — | — | — | — | — | — | — | — |
| 121 | I59 | — | — | — | — | — | — | — | — |
| 122 | I59 | — | — | — | — | — | — | — | — |
| 123 | I59 | — | — | — | — | — | — | — | — |
| 124 | I59 | — | — | — | — | — | — | — | — |
| 125 | I59 | — | — | — | — | — | — | — | — |
| 126 | I59 | — | — | — | — | — | — | — | — |
| 127 | I59 | — | — | — | — | — | — | — | — |
| 128 | I59 | — | — | — | — | — | — | — | — |
| 129 | I59 | — | — | — | — | — | — | — | — |
| 130 | I59 | — | — | — | — | — | — | — | — |
| 131 | I59 | — | — | — | — | — | — | — | — |
| 132 | I59 | — | — | — | — | — | — | — | — |
| 133 | I59 | — | — | — | — | — | — | — | — |
| 134 | I59 | — | — | — | — | — | — | — | — |
| 135 | I59 | — | — | — | — | — | — | — | — |
| 136 | I59 | — | — | — | — | — | — | — | — |
| 137 | I59 | — | — | — | — | — | — | — | — |
| 138 | I59 | — | — | — | — | — | — | — | — |
| 139 | I59 | — | — | — | — | — | — | — | — |
| 140 | I59 | — | — | — | — | — | — | — | — |
| 141 | I59 | — | — | — | — | — | — | — | — |
| 142 | I59 | — | — | — | — | — | — | — | — |
| 143 | I59 | — | — | — | — | — | — | — | — |
| 144 | I59 | — | — | — | — | — | — | — | — |
| 145 | I59 | — | — | — | — | — | — | — | — |
| 146 | I59 | — | — | — | — | — | — | — | — |
| 147 | I59 | — | — | — | — | — | — | — | — |
| 148 | I59 | — | — | — | — | — | — | — | — |
| 149 | I59 | — | — | — | — | — | — | — | — |
| 150 | I59 | — | — | — | — | — | — | — | — |
| 151 | I59 | — | — | — | — | — | — | — | — |
| 152 | I59 | — | — | — | — | — | — | — | — |
| 153 | I59 | — | — | — | — | — | — | — | — |
| 154 | I59 | — | — | — | — | — | — | — | — |
| 155 | I59 | — | — | — | — | — | — | — | — |
| 156 | I59 | — | — | — | — | — | — | — | — |
| 157 | I59 | — | — | — | — | — | — | — | — |
| 158 | I59 | — | — | — | — | — | — | — | — |
| 159 | I59 | — | — | — | — | — | — | — | — |
| 160 | I59 | — | — | — | — | — | — | — | — |
| 161 | I59 | — | — | — | — | — | — | — | — |
| 162 | I59 | — | — | — | — | — | — | — | — |
| 163 | I59 | — | — | — | — | — | — | — | — |
| 164 | I59 | — | — | — | — | — | — | — | — |
| 165 | I59 | — | — | — | — | — | — | — | — |
| 166 | I59 | — | — | — | — | — | — | — | — |
| 167 | I59 | — | — | — | — | — | — | — | — |
| 168 | I59 | — | — | — | — | — | — | — | — |
| 169 | I59 | — | — | — | — | — | — | — | — |
| 170 | I59 | — | — | — | — | — | — | — | — |
| 171 | I59 | — | — | — | — | — | — | — | — |
| 172 | I59 | — | — | — | — | — | — | — | — |
| 173 | I59 | — | — | — | — | — | — | — | — |
| 174 | I59 | — | — | — | — | — | — | — | — |
| 175 | I51 | — | — | — | — | — | — | — | — |
| 176 | I59 | — | — | — | — | — | — | — | — |
| 177 | I59 | — | — | — | — | — | — | — | — |
| 178 | I59 | — | — | — | — | — | — | — | — |
| 179 | I59 | — | — | — | — | — | — | — | — |
| 180 | I57 | — | — | — | — | — | — | — | — |
| 181 | I59 | — | — | — | — | — | — | — | — |
| 182 | I59 | — | — | — | — | — | — | — | — |
| 183 | I59 | — | — | — | — | — | — | — | — |
| 184 | — | — | — | — | — | A35 | V37 | H38 | R39 |
| 185 | — | — | — | — | — | A35 | V37 | H38 | R39 |
| 186 | — | — | — | — | — | T35 | V37 | H38 | R39 |
| 187 | — | — | — | — | — | A35 | V37 | H38 | R39 |
| 188 | — | — | — | — | — | A35 | V37 | H38 | R39 |
| 189 | — | — | — | — | — | A35 | V37 | H38 | R39 |
| 190 | — | — | — | — | — | A35 | V37 | H38 | R39 |
| 191 | — | — | — | — | — | A35 | V37 | H38 | R39 |
| 192 | — | — | — | — | — | A35 | V37 | H38 | R39 |
| 193 | — | — | — | — | — | A35 | V37 | H38 | R39 |
| 194 | — | — | — | — | — | A35 | V37 | H38 | R39 |
| 195 | — | — | — | — | — | A35 | V37 | H38 | R39 |
| 196 | — | — | — | — | — | A35 | V37 | H38 | R39 |
| 197 | — | — | — | — | — | A35 | V37 | H38 | R39 |
| 198 | — | — | — | — | — | A35 | V37 | H38 | R39 |
| 199 | — | — | — | — | — | A35 | V37 | H38 | R39 |
| 200 | — | — | — | — | — | V35 | L37 | H38 | R39 |
| 201 | — | — | — | — | — | A15 | V17 | H18 | R19 |
| 202 | — | — | — | — | — | V35 | L37 | H38 | R39 |
| 203 | — | — | — | — | — | V35 | L37 | H38 | R39 |
| 204 | — | — | — | — | — | I35 | L37 | H38 | R39 |
| 205 | — | — | — | — | — | V35 | L37 | H38 | R39 |
| 206 | — | — | — | — | — | V35 | L37 | H38 | R39 |
| 207 | — | — | — | — | — | V35 | L37 | H38 | R39 |
| 208 | — | — | — | — | — | I35 | L37 | H38 | R39 |
| 209 | — | — | — | — | — | V35 | L37 | H38 | R39 |
| 210 | — | — | — | — | — | F35 | L37 | H38 | R39 |
| 211 | — | — | — | — | — | V35 | L37 | H38 | R39 |
| 212 | — | — | — | — | — | I35 | L37 | H38 | R39 |
| 213 | — | — | — | — | — | V35 | L37 | H38 | R39 |
| 214 | — | — | — | — | — | V35 | L37 | H38 | R39 |
| 215 | — | — | — | — | — | V35 | L37 | H38 | R39 |
| 216 | — | — | — | — | — | V35 | L37 | H38 | R39 |
| 217 | — | — | — | — | — | V35 | L37 | H38 | R39 |
| 218 | — | — | — | — | — | V35 | L37 | H38 | R39 |
| 219 | — | — | — | — | — | V35 | L37 | H38 | R39 |
| 220 | — | — | — | — | — | V35 | L37 | H38 | R39 |
| 221 | — | — | — | — | — | V35 | L37 | H38 | R39 |
| 222 | — | — | — | — | — | V35 | L37 | H38 | R39 |
| 223 | — | — | — | — | — | V35 | L37 | H38 | R39 |
| 224 | — | — | — | — | — | V35 | L37 | H38 | R39 |
| 225 | — | — | — | — | — | V35 | L37 | H38 | R39 |
| 226 | — | — | — | — | — | V35 | L37 | H38 | R39 |
| 227 | — | — | — | — | — | V35 | L37 | H38 | R39 |
| 228 | — | — | — | — | — | V35 | L37 | H38 | R39 |
| 229 | — | — | — | — | — | V35 | L37 | H38 | R39 |
| 230 | — | — | — | — | — | V35 | L37 | H38 | R39 |
| 231 | — | — | — | — | — | V35 | L37 | H38 | R39 |
| 232 | — | — | — | — | — | V35 | L37 | H38 | R39 |
| 233 | — | — | — | — | — | V35 | L37 | H38 | R39 |
| 234 | — | — | — | — | — | V35 | L37 | H38 | R39 |
| 235 | — | — | — | — | — | M35 | L37 | H38 | R39 |
| 236 | — | — | — | — | — | V35 | L37 | H38 | R39 |
| 237 | — | — | — | — | — | V35 | L37 | H38 | R39 |
| 238 | — | — | — | — | — | V35 | L37 | H38 | R39 |
| 239 | — | — | — | — | — | V35 | L37 | H38 | R39 |
| 240 | — | — | — | — | — | L35 | L37 | H38 | R39 |
| 241 | — | — | — | — | — | V35 | L37 | H38 | R39 |
| 242 | — | — | — | — | — | V35 | L37 | H38 | R39 |
| 243 | — | — | — | — | — | V35 | L37 | H38 | R39 |
| 244 | — | — | — | — | — | V35 | L37 | H38 | R39 |
| 245 | — | — | — | — | — | V35 | L37 | H38 | R39 |
| 246 | — | — | — | — | — | V35 | L37 | H38 | R39 |
| 247 | — | — | — | — | — | V35 | L37 | H38 | R39 |
| 248 | — | — | — | — | — | V35 | L37 | H38 | R39 |
| 249 | — | — | — | — | — | V41 | L43 | H44 | R45 |
| 250 | — | — | — | — | — | V35 | L37 | H38 | R39 |
| 251 | — | — | — | — | — | V25 | L27 | H28 | R29 |
| 252 | — | — | — | — | — | V35 | L37 | N38 | R39 |
| 253 | — | — | — | — | — | V35 | L37 | N38 | R39 |
| 254 | — | — | — | — | — | V35 | L37 | N38 | R39 |
| 255 | — | — | — | — | — | V35 | L37 | N38 | R39 |
| 256 | — | — | — | — | — | V35 | L37 | N38 | R39 |
| 257 | — | — | — | — | — | V35 | L37 | N38 | R39 |
| 258 | — | — | — | — | — | V35 | L37 | N38 | R39 |
| 259 | — | — | — | — | — | V35 | L37 | N38 | R39 |
| 260 | — | — | — | — | — | V35 | L37 | N38 | R39 |
| 261 | — | — | — | — | — | V35 | L37 | N38 | R39 |
| 262 | — | — | — | — | — | V35 | L37 | N38 | R39 |
| 263 | — | — | — | — | — | V35 | L37 | N38 | R39 |
| 264 | — | — | — | — | — | V35 | L37 | N38 | R39 |
| 265 | — | — | — | — | — | V35 | L37 | N38 | R39 |
| 266 | — | — | — | — | — | V35 | L37 | N38 | R39 |
| 267 | — | — | — | — | — | V35 | L37 | N38 | R39 |
| 268 | — | — | — | — | — | V35 | L37 | N38 | R39 |
| 269 | — | — | — | — | — | V35 | L37 | N38 | R39 |
| 270 | — | — | — | — | — | V35 | L37 | N38 | R39 |
| 271 | — | — | — | — | — | V35 | L37 | N38 | R39 |
| 272 | — | — | — | — | — | V35 | L37 | N38 | R39 |
| 273 | — | — | — | — | — | V35 | L37 | N38 | R39 |
| 274 | — | — | — | — | — | V35 | L37 | N38 | R39 |
| 275 | — | — | P117 | G118 | A119 | — | — | — | — |
| 276 | — | — | P117 | G118 | A119 | — | — | — | — |
| 277 | — | — | P117 | G118 | A119 | — | — | — | — |
| 278 | — | — | P117 | G118 | A119 | — | — | — | — |
| 279 | — | — | P117 | G118 | A119 | — | — | — | — |
| 280 | — | — | P117 | G118 | A119 | — | — | — | — |
| 281 | — | — | P117 | G118 | A119 | — | — | — | — |
| 282 | — | — | P117 | G118 | A119 | — | — | — | — |
| 283 | — | — | P117 | D118 | A119 | — | — | — | — |
| 284 | — | — | P117 | G118 | A119 | — | — | — | — |
| 285 | — | — | P117 | G118 | A119 | — | — | — | — |
| 286 | — | — | P117 | G118 | A119 | — | — | — | — |
| 287 | — | — | P117 | G118 | A119 | — | — | — | — |
| 288 | — | — | P117 | G118 | A119 | — | — | — | — |
| 289 | — | — | P117 | G118 | A119 | — | — | — | — |
| 290 | — | — | P117 | G118 | A119 | — | — | — | — |
| 291 | — | — | P117 | G118 | A119 | — | — | — | — |
| 292 | — | — | P120 | G121 | E122 | — | — | — | — |
| 293 | — | — | E118 | G119 | A120 | — | — | — | — |
| 294 | — | — | E120 | G121 | A122 | — | — | — | — |
| 295 | — | — | A119 | G120 | E121 | — | — | — | — |
| 296 | — | — | D119 | G120 | E121 | — | — | — | — |
| 297 | — | — | D119 | G120 | E121 | — | — | — | — |
| 298 | — | — | E119 | G120 | E121 | — | — | — | — |
| 299 | — | — | E124 | G125 | E126 | — | — | — | — |
| 300 | — | — | E123 | G124 | E125 | — | — | — | — |
| 301 | — | — | E119 | G120 | A121 | — | — | — | — |

TABLE 2b-2

| ID | Pos 21 | Pos 22 | Pos 23 | Pos 24 | Pos 25 | Pos 26 | Pos 27 | Pos 28 | Pos 29 | Pos 30 | Pos 31 | Pos 32 | Pos 33 | Pos 34 | Pos 35 | Pos 36 | Pos 37 | Pos 38 | Pos 39 | Pos 40 |
|---|---|---|---|---|---|---|---|---|---|---|---|---|---|---|---|---|---|---|---|---|
| 1 | N227 | S234 | S246 | K259 | P260 | R261 | L295 | Q301 | G308 | S324 | R335 | G346 | F349 | L351 | D352 | T358 | L384 | L397 | F417 | T418 |
| 2 | A178 | S185 | S197 | T205 | P206 | — | H238 | G244 | — | S262 | H273 | D281 | V284 | L286 | A287 | T293 | L319 | L330 | L350 | T351 |
| 3 | E179 | S186 | Q198 | R205 | R206 | — | L238 | E244 | — | F262 | H273 | H281 | V284 | R286 | R287 | E293 | L319 | L330 | L350 | T351 |
| 4 | A178 | S185 | S197 | T205 | P206 | — | H238 | G244 | — | S262 | H273 | D281 | V284 | L286 | A287 | T293 | L319 | L330 | L350 | T351 |
| 5 | E179 | S186 | Q198 | R205 | R206 | — | L238 | E244 | — | F262 | H273 | H281 | V284 | R286 | R287 | E293 | L319 | L330 | L350 | T351 |
| 6 | A187 | S194 | A206 | L215 | P216 | A217 | T254 | P260 | — | H275 | H286 | D296 | L299 | — | E301 | E307 | L333 | L343 | L363 | S364 |
| 7 | A180 | G187 | A199 | P205 | K206 | A207 | E240 | E246 | — | A259 | H270 | E278 | I281 | — | — | D287 | L313 | L323 | L343 | T344 |
| 8 | A184 | S191 | R203 | P209 | R210 | — | T243 | G249 | — | I270 | S281 | S291 | A294 | — | D296 | R302 | L328 | L338 | L358 | T359 |
| 9 | E195 | S202 | R214 | R221 | P222 | — | D254 | D260 | — | S276 | P287 | G298 | P301 | — | A303 | E309 | L335 | L345 | L365 | T366 |
| 10 | R180 | G187 | R199 | S206 | K207 | Q208 | L241 | N247 | — | T265 | Y276 | D286 | L289 | — | E291 | Y297 | L323 | L333 | F353 | T354 |
| 11 | A182 | S189 | K201 | K224 | R225 | — | L259 | Q265 | N272 | H289 | H300 | G311 | Y314 | L316 | D317 | V323 | L349 | L362 | F382 | T383 |
| 12 | N198 | S205 | T217 | K232 | K233 | Q234 | F268 | P274 | E281 | S299 | C310 | R321 | F324 | L326 | N327 | S333 | L359 | L372 | Y392 | T393 |
| 13 | A194 | S201 | S213 | R222 | E223 | W224 | V261 | A267 | — | R281 | P292 | D302 | L305 | — | A307 | A313 | L339 | L349 | L369 | T370 |
| 14 | R184 | G191 | R203 | S211 | P212 | — | I244 | E250 | — | T267 | P278 | D287 | G290 | S292 | S293 | P299 | L325 | L335 | L355 | T356 |
| 15 | S192 | S199 | K211 | R234 | P235 | R236 | T270 | Q276 | Q283 | T303 | D314 | G325 | Y328 | L330 | D331 | I337 | L363 | L377 | F397 | T398 |
| 16 | S192 | S199 | K211 | R234 | P235 | R236 | T270 | Q276 | Q283 | T303 | D314 | G325 | Y328 | L330 | D331 | I337 | L363 | L377 | F397 | T398 |
| 17 | N199 | S206 | A218 | K233 | K234 | G235 | L269 | S275 | E280 | H298 | C309 | G320 | F323 | L325 | N326 | N332 | L358 | L371 | Y391 | T392 |
| 18 | A181 | S188 | G200 | — | — | — | T238 | G244 | — | E257 | A268 | A278 | L281 | — | A283 | V289 | L315 | L325 | L345 | T346 |
| 19 | N203 | S210 | A222 | K237 | R238 | G239 | L273 | S279 | E284 | H302 | C313 | G324 | F327 | L329 | N330 | N336 | L362 | L375 | Y395 | T396 |
| 20 | N197 | S204 | A216 | N231 | K232 | H233 | L267 | H273 | Q280 | D294 | Y305 | G316 | F319 | L321 | N322 | S328 | L354 | L367 | Y387 | T388 |
| 21 | E183 | S190 | K202 | E207 | P208 | M210 | V244 | D250 | — | I267 | F278 | D288 | A291 | — | G293 | P299 | L325 | L335 | T355 | T356 |
| 22 | N197 | S204 | G216 | N231 | K232 | H233 | L267 | H273 | Q280 | D294 | G305 | G316 | F319 | L321 | N322 | T328 | L354 | L367 | Y387 | T388 |
| 23 | E184 | S191 | K203 | E208 | P209 | M211 | V245 | G251 | — | T268 | Y279 | D289 | A292 | — | S294 | P300 | L326 | L336 | T356 | I357 |
| 24 | N199 | S206 | A218 | K233 | K234 | R235 | L269 | H275 | E282 | S300 | C311 | G322 | F325 | L327 | D328 | S334 | L360 | L373 | Y393 | T394 |
| 25 | N232 | S239 | A251 | R266 | R267 | N268 | L302 | F308 | G315 | T336 | S347 | G358 | V361 | L363 | D364 | D370 | L396 | L410 | Y430 | T431 |
| 26 | N169 | S176 | A188 | K203 | K204 | G205 | L239 | S245 | E250 | H268 | C279 | G290 | F293 | L295 | N296 | N302 | L328 | L341 | Y361 | T362 |
| 27 | E175 | S182 | — | G194 | P195 | — | L226 | D232 | — | T245 | T256 | S266 | I269 | — | E271 | Y277 | L300 | L310 | I330 | T331 |
| 28 | R177 | G184 | A196 | G208 | P209 | — | K242 | K248 | — | E265 | Y276 | S286 | L289 | — | E291 | E297 | L323 | L333 | I353 | R354 |
| 29 | A180 | G187 | R199 | S206 | K207 | Q208 | I241 | A247 | — | V264 | Y275 | D285 | F288 | — | V290 | Y296 | L322 | L332 | F352 | T353 |
| 30 | N232 | S239 | A251 | R266 | R267 | N268 | L302 | L308 | G315 | T336 | S347 | G358 | F361 | L363 | D364 | D370 | L396 | L410 | Y430 | T431 |
| 31 | Y178 | G185 | A197 | G208 | P209 | — | L242 | E248 | — | T265 | Y276 | N286 | L289 | — | K291 | E297 | L323 | L333 | I353 | R354 |
| 32 | A179 | S186 | — | T202 | P203 | — | E236 | D242 | — | Q255 | G266 | D276 | L279 | — | H281 | P287 | L313 | L323 | L343 | T344 |
| 33 | Q175 | S182 | — | G194 | P195 | — | L226 | D232 | — | E245 | T256 | S266 | A269 | — | Q271 | Y277 | L299 | L309 | L329 | T330 |
| 34 | E176 | S183 | F195 | — | — | — | Q227 | E233 | — | D246 | D257 | F267 | I270 | — | A272 | T278 | L304 | A314 | L334 | T335 |
| 35 | A179 | S186 | K198 | P203 | K204 | — | D236 | G242 | — | Q255 | G266 | D276 | L279 | — | R281 | P287 | L313 | L323 | L343 | T344 |
| 36 | N184 | G191 | K203 | G208 | P209 | — | T243 | N249 | — | N262 | Y273 | S283 | L286 | — | D288 | N294 | L320 | L330 | I350 | R351 |
| 37 | E187 | G194 | K206 | G221 | P222 | — | T256 | N262 | — | D276 | Y287 | D297 | M300 | — | A302 | P308 | L334 | L344 | L364 | R365 |
| 38 | W181 | G188 | K200 | Q206 | P207 | — | L240 | N246 | — | E260 | H271 | S281 | L284 | — | D286 | P292 | L318 | L328 | L348 | R349 |
| 39 | E185 | S192 | K204 | G219 | P220 | — | L254 | G260 | — | D274 | Y285 | D295 | M298 | — | G300 | P306 | L332 | L342 | L362 | R363 |
| 40 | E185 | S192 | K204 | G219 | P220 | — | L254 | G260 | — | D274 | Y285 | D295 | M298 | — | G300 | P306 | L332 | L342 | L362 | R363 |
| 41 | E176 | S183 | — | G195 | P196 | — | L227 | E233 | — | E246 | Y257 | S267 | A270 | — | E272 | D278 | L299 | L309 | L329 | T330 |
| 42 | E184 | G191 | K203 | G218 | P219 | — | A252 | K258 | — | E272 | M283 | S293 | M296 | — | A298 | P304 | L330 | L340 | L360 | R361 |
| 43 | E185 | S192 | K204 | G219 | P220 | — | T254 | S260 | — | D274 | H285 | D295 | M298 | — | Q300 | P306 | L332 | L342 | L362 | R363 |
| 44 | E175 | S182 | E194 | — | — | — | L226 | M232 | — | T249 | F260 | Y270 | L273 | — | A275 | Q281 | L307 | A317 | T337 | T338 |
| 45 | E187 | G194 | K206 | G221 | P222 | — | V256 | S262 | — | D276 | Y287 | D297 | M300 | — | G302 | P308 | L334 | L344 | L364 | R365 |
| 46 | D177 | S184 | P196 | R202 | K203 | A204 | R238 | G244 | — | P263 | H274 | P284 | E287 | — | A289 | Y295 | L320 | L330 | Y350 | S351 |
| 47 | K178 | S185 | A197 | G207 | P208 | L210 | E243 | A249 | — | S266 | H277 | D287 | L290 | — | Q292 | P298 | L323 | L333 | L353 | T354 |
| 48 | D183 | G190 | K202 | G207 | P208 | — | F241 | I247 | — | E260 | Y271 | D281 | L284 | — | R286 | T292 | L318 | L328 | V348 | R349 |
| 49 | D177 | S184 | P196 | R202 | K203 | A204 | R238 | G244 | — | P263 | H274 | P284 | E287 | — | A289 | Y295 | L320 | L330 | Y350 | S351 |
| 50 | Q179 | S186 | Q198 | T206 | K207 | L208 | E241 | Q247 | — | E264 | H275 | D285 | L288 | — | G290 | P296 | L321 | L331 | Y351 | T352 |
| 51 | D177 | S184 | P196 | R202 | K203 | A204 | R238 | G244 | — | P263 | H274 | P284 | E287 | — | A289 | Y295 | L320 | L330 | Y350 | S351 |
| 52 | R188 | G195 | K207 | G216 | P217 | — | I250 | P256 | — | I274 | A285 | Q295 | I298 | — | S300 | P306 | L332 | L342 | L362 | T363 |
| 53 | Q183 | S190 | — | S204 | A205 | G207 | S239 | P245 | — | T258 | D269 | Y279 | L282 | — | R284 | T290 | L316 | A326 | F346 | T347 |
| 54 | Q201 | S208 | G220 | G229 | P230 | R231 | D265 | E271 | — | Q285 | F296 | D306 | L309 | — | R311 | P317 | V343 | I353 | L373 | R374 |
| 55 | Q187 | G194 | K206 | G221 | P222 | — | S255 | K261 | — | D276 | H287 | D297 | I300 | — | S302 | P308 | L334 | L344 | L364 | R365 |
| 56 | E176 | S183 | — | G195 | P196 | — | L227 | E233 | — | E246 | Y257 | S267 | A270 | — | E272 | D278 | L299 | L309 | L329 | T330 |
| 57 | Q201 | S208 | G220 | G229 | P230 | R231 | D265 | E271 | — | Q285 | F296 | D306 | L309 | — | R311 | P317 | V343 | I353 | L373 | R374 |
| 58 | A178 | G185 | R197 | P204 | K205 | I206 | L239 | G245 | — | R262 | Y273 | A283 | A286 | — | R288 | V294 | L320 | L330 | L350 | T351 |
| 59 | R184 | G191 | R203 | S211 | P212 | — | I244 | E250 | — | T267 | P278 | D287 | G290 | S292 | S293 | P299 | L325 | L335 | L355 | T356 |
| 60 | D168 | S175 | S187 | S198 | K199 | R200 | L234 | C240 | G246 | S263 | N274 | G285 | F288 | L290 | N291 | S297 | L323 | L336 | Y356 | T357 |
| 61 | N227 | S234 | S246 | K260 | P261 | R262 | L296 | Q302 | G309 | S325 | R336 | G347 | F350 | L352 | D353 | T359 | L385 | L398 | F418 | T419 |
| 62 | D195 | S202 | P214 | K225 | T226 | R227 | L261 | H267 | N272 | P288 | T299 | G310 | F313 | L315 | D316 | D322 | L348 | L361 | Y381 | T382 |
| 63 | D195 | S202 | P214 | K225 | T226 | R227 | L261 | H267 | N272 | P288 | T299 | G310 | F313 | L315 | D316 | D322 | L348 | L361 | Y381 | T382 |
| 64 | N192 | S199 | P211 | K226 | K227 | R228 | L262 | C268 | D275 | S293 | C304 | G315 | F318 | L320 | N321 | D327 | L353 | L366 | Y386 | T387 |
| 65 | Q189 | S196 | K208 | A214 | F215 | — | I248 | E254 | — | R271 | A282 | A292 | I295 | — | S297 | P303 | L329 | L339 | L359 | T360 |
| 66 | N232 | S239 | A251 | R266 | R267 | N268 | L302 | F308 | G315 | T336 | S347 | G358 | V361 | L363 | D364 | D370 | L396 | L410 | Y430 | T431 |
| 67 | N197 | S204 | T216 | G231 | R232 | N233 | L267 | C273 | G280 | S301 | S312 | G323 | F326 | L328 | D329 | D335 | L361 | L375 | Y395 | T396 |
| 68 | N230 | S237 | A249 | R264 | R265 | N266 | L300 | F306 | G313 | T334 | S345 | G356 | F359 | L361 | D362 | N368 | L394 | L408 | Y428 | T429 |
| 69 | D199 | S206 | A218 | G233 | R234 | N235 | L269 | C275 | D282 | L303 | S314 | G325 | F328 | L330 | D331 | D337 | L363 | L377 | F397 | T398 |
| 70 | N241 | S248 | T260 | G275 | R276 | N277 | L311 | C317 | G324 | S345 | S356 | G367 | F370 | L372 | D373 | D379 | L405 | L419 | Y439 | T440 |
| 71 | D203 | S210 | R222 | K237 | R238 | — | L272 | L278 | N285 | S306 | — | — | — | — | — | T315 | L341 | L354 | F374 | T375 |
| 72 | N196 | S203 | T215 | G230 | R231 | N232 | L266 | C272 | G279 | S300 | S311 | G322 | F325 | L327 | D328 | D334 | L360 | L374 | Y394 | T395 |
| 73 | D177 | S184 | P196 | R202 | K203 | A204 | R238 | G244 | — | P263 | H274 | P284 | E287 | — | A289 | Y295 | L320 | L330 | Y350 | S351 |
| 74 | N207 | S214 | T226 | G241 | R242 | D243 | L277 | C283 | G290 | S311 | S322 | G333 | F336 | L338 | D339 | D345 | L371 | L385 | Y405 | T406 |
| 75 | A178 | S185 | — | P203 | D204 | T205 | H238 | G244 | T245 | S262 | H273 | D281 | V284 | L286 | A287 | T293 | L319 | L330 | L350 | T351 |
| 76 | E179 | S186 | — | A203 | P204 | R205 | L238 | E244 | N246 | F262 | H273 | H281 | V284 | R286 | R287 | E293 | L319 | L330 | L350 | T351 |
| 77 | I180 | S184 | — | C199 | P200 | G201 | T243 | E249 | — | D264 | L275 | L286 | K289 | H291 | K292 | G298 | F324 | R343 | L363 | D364 |
| 78 | M157 | A161 | — | V176 | K177 | G178 | T220 | G226 | — | D242 | L253 | V263 | R266 | Q268 | Q269 | G275 | L301 | V326 | L342 | I343 |
| 79 | S181 | R185 | P207 | T220 | E221 | L222 | K258 | A264 | G266 | D283 | A294 | A305 | L308 | D310 | R311 | S319 | N364 | V387 | G412 | T413 |
| 80 | K420 | P428 | E453 | S475 | Q476 | V477 | L521 | D527 | Y531 | D548 | P559 | A570 | Y573 | L575 | I576 | E584 | A627 | L652 | L702 | E703 |
| 81 | R243 | S250 | A275 | T288 | L289 | K290 | E327 | Q333 | G334 | T350 | E361 | H369 | A372 | S374 | R375 | P381 | L405 | L420 | V440 | T441 |
| 82 | E178 | T185 | — | — | — | — | L195 | R201 | — | — | E202 | K208 | N211 | V213 | K214 | Y220 | — | — | — | — |
| 83 | E198 | S206 | V220 | A233 | M234 | E235 | K272 | S278 | K279 | — | P299 | T306 | S309 | L311 | P312 | P318 | L345 | L364 | M388 | T389 |
| 84 | — | S63 | V75 | — | — | — | — | — | — | H83 | — | — | — | — | W89 | G95 | — | — | Y103 | H104 |
| 85 | — | S63 | V75 | — | — | — | — | — | — | H83 | — | — | — | — | W89 | G95 | — | — | Y103 | H104 |
| 86 | — | S63 | V75 | — | — | — | — | — | — | H83 | — | — | — | — | W89 | G95 | — | — | Y103 | H104 |
| 87 | — | S63 | V75 | — | — | — | — | — | — | H83 | — | — | — | — | W89 | G95 | — | — | Y103 | H104 |
| 88 | — | S63 | V75 | — | — | — | — | — | — | H83 | — | — | — | — | W89 | G95 | — | — | Y103 | H104 |
| 89 | — | S63 | V75 | — | — | — | — | — | — | H83 | — | — | — | — | W89 | G95 | — | — | Y103 | H104 |
| 90 | — | S63 | V75 | — | — | — | — | — | — | H83 | — | — | — | — | W89 | G95 | — | — | Y103 | H104 |
| 91 | — | S63 | V75 | — | — | — | — | — | — | H83 | — | — | — | — | W89 | G95 | — | — | Y103 | H104 |
| 92 | — | S63 | V75 | — | — | — | — | — | — | H83 | — | — | — | — | W89 | G95 | — | — | Y103 | H104 |
| 93 | — | S63 | V75 | — | — | — | — | — | — | H83 | — | — | — | — | W89 | G95 | — | — | Y103 | H104 |
| 94 | — | S63 | V75 | — | — | — | — | — | — | H83 | — | — | — | — | W89 | G95 | — | — | Y103 | H104 |
| 95 | — | S63 | V75 | — | — | — | — | — | — | H83 | — | — | — | — | W89 | G95 | — | — | Y103 | H104 |
| 96 | — | S63 | V75 | — | — | — | — | — | — | H83 | — | — | — | — | W89 | G95 | — | — | Y103 | H104 |
| 97 | — | S63 | V75 | — | — | — | — | — | — | H83 | — | — | — | — | W89 | G95 | — | — | Y103 | H104 |
| 98 | — | S63 | V75 | — | — | — | — | — | — | H83 | — | — | — | — | W89 | G95 | — | — | Y103 | H104 |
| 99 | — | S63 | V75 | — | — | — | — | — | — | H83 | — | — | — | — | W89 | G95 | — | — | Y103 | H104 |
| 100 | — | S63 | V75 | — | — | — | — | — | — | H83 | — | — | — | — | W89 | G95 | — | — | Y103 | H104 |
| 101 | — | S63 | V75 | — | — | — | — | — | — | H83 | — | — | — | — | W89 | G95 | — | — | Y103 | H104 |
| 102 | — | S63 | V75 | — | — | — | — | — | — | H83 | — | — | — | — | W89 | G95 | — | — | Y103 | H104 |
| 103 | — | S63 | V75 | — | — | — | — | — | — | H83 | — | — | — | — | W89 | G95 | — | — | Y103 | H104 |
| 104 | — | S63 | V75 | — | — | — | — | — | — | H83 | — | — | — | — | W89 | G95 | — | — | Y103 | H104 |
| 105 | — | S63 | V75 | — | — | — | — | — | — | H83 | — | — | — | — | W89 | G95 | — | — | Y103 | H104 |
| 106 | — | S63 | V75 | — | — | — | — | — | — | H83 | — | — | — | — | W89 | G95 | — | — | Y103 | H104 |
| 107 | — | S63 | V75 | — | — | — | — | — | — | H83 | — | — | — | — | W89 | G95 | — | — | Y103 | H104 |
| 108 | — | S63 | V75 | — | — | — | — | — | — | H83 | — | — | — | — | W89 | G95 | — | — | Y103 | H104 |
| 109 | — | S63 | V75 | — | — | — | — | — | — | H83 | — | — | — | — | W89 | G95 | — | — | Y103 | H104 |
| 110 | — | A63 | V75 | — | — | — | — | — | — | H83 | — | — | — | — | W89 | G95 | — | — | Y103 | H104 |
| 111 | — | S63 | V75 | — | — | — | — | — | — | H83 | — | — | — | — | W89 | G95 | — | — | Y103 | H104 |
| 112 | — | S63 | V75 | — | — | — | — | — | — | H83 | — | — | — | — | — | T88 | — | — | Y103 | H104 |
| 113 | — | S63 | V75 | — | — | — | — | — | — | H83 | — | — | — | — | — | I88 | — | — | Y103 | H104 |
| 114 | — | S63 | V75 | — | — | — | — | — | — | H83 | — | — | — | — | — | T88 | — | — | Y103 | H104 |
| 115 | — | A63 | V75 | — | — | — | — | — | — | H83 | — | — | — | — | — | L88 | — | — | Y103 | H104 |
| 116 | — | A63 | V75 | — | — | — | — | — | — | H83 | — | — | — | — | — | L88 | — | — | Y103 | H104 |
| 117 | — | S63 | V75 | — | — | — | — | — | — | H83 | — | — | — | — | — | T88 | — | — | Y103 | H104 |
| 118 | — | S63 | V75 | — | — | — | — | — | — | H83 | — | — | — | — | — | L88 | — | — | Y103 | H104 |
| 119 | — | S63 | V75 | — | — | — | — | — | — | H83 | — | — | — | — | — | L88 | — | — | Y103 | H104 |
| 120 | — | S63 | V75 | — | — | — | — | — | — | H83 | — | — | — | — | — | T88 | — | — | Y103 | H104 |
| 121 | — | S63 | V75 | — | — | — | — | — | — | H83 | — | — | — | — | — | L88 | — | — | Y103 | H104 |
| 122 | — | S63 | V75 | — | — | — | — | — | — | H83 | — | — | — | — | — | T88 | — | — | Y103 | H104 |
| 123 | — | S63 | V75 | — | — | — | — | — | — | H83 | — | — | — | — | — | T88 | — | — | Y103 | H104 |
| 124 | — | S63 | V75 | — | — | — | — | — | — | H83 | — | — | — | — | — | T88 | — | — | Y103 | H104 |
| 125 | — | S63 | V75 | — | — | — | — | — | — | H83 | — | — | — | — | — | L88 | — | — | Y103 | H104 |
| 126 | — | S63 | V75 | — | — | — | — | — | — | H83 | — | — | — | — | — | T88 | — | — | Y103 | H104 |
| 127 | — | S63 | V75 | — | — | — | — | — | — | H83 | — | — | — | — | — | T88 | — | — | Y103 | H104 |
| 128 | — | S63 | V75 | — | — | — | — | — | — | H83 | — | — | — | — | — | L88 | — | — | Y103 | H104 |
| 129 | — | S63 | V75 | — | — | — | — | — | — | H83 | — | — | — | — | — | T88 | — | — | Y103 | H104 |
| 130 | — | S63 | V75 | — | — | — | — | — | — | H83 | — | — | — | — | — | T88 | — | — | Y103 | H104 |
| 131 | — | S63 | V75 | — | — | — | — | — | — | H83 | — | — | — | — | — | T88 | — | — | Y103 | H104 |
| 132 | — | S63 | V75 | — | — | — | — | — | — | H83 | — | — | — | — | — | T88 | — | — | Y103 | H104 |
| 133 | — | A63 | V75 | — | — | — | — | — | — | H83 | — | — | — | — | — | L88 | — | — | Y103 | H104 |
| 134 | — | S63 | V75 | — | — | — | — | — | — | H83 | — | — | — | — | — | T88 | — | — | Y103 | H104 |
| 135 | — | S63 | V75 | — | — | — | — | — | — | H83 | — | — | — | — | — | T88 | — | — | Y103 | H104 |
| 136 | — | S63 | V75 | — | — | — | — | — | — | H83 | — | — | — | — | — | L88 | — | — | Y103 | H104 |
| 137 | — | S63 | V75 | — | — | — | — | — | — | H83 | — | — | — | — | — | T88 | — | — | Y103 | H104 |
| 138 | — | S63 | V75 | — | — | — | — | — | — | H83 | — | — | — | — | — | T88 | — | — | Y103 | H104 |
| 139 | — | S63 | V75 | — | — | — | — | — | — | H83 | — | — | — | — | — | T88 | — | — | Y103 | H104 |
| 140 | — | A63 | V75 | — | — | — | — | — | — | H83 | — | — | — | — | — | L88 | — | — | Y103 | H104 |
| 141 | — | S63 | V75 | — | — | — | — | — | — | H83 | — | — | — | — | — | T88 | — | — | Y103 | H104 |
| 142 | — | S63 | V75 | — | — | — | — | — | — | H83 | — | — | — | — | — | V88 | — | — | Y103 | H104 |
| 143 | — | S63 | V75 | — | — | — | — | — | — | H83 | — | — | — | — | — | T88 | — | — | Y103 | N104 |
| 144 | — | S63 | V75 | — | — | — | — | — | — | H83 | — | — | — | — | — | L88 | — | — | Y103 | H104 |
| 145 | — | S63 | V75 | — | — | — | — | — | — | H83 | — | — | — | — | — | T88 | — | — | Y103 | H104 |
| 146 | — | S63 | V75 | — | — | — | — | — | — | H83 | — | — | — | — | — | T88 | — | — | Y103 | H104 |
| 147 | — | S63 | V75 | — | — | — | — | — | — | H83 | — | — | — | — | — | T88 | — | — | Y103 | H104 |
| 148 | — | A63 | V75 | — | — | — | — | — | — | H83 | — | — | — | — | — | L88 | — | — | Y103 | H104 |
| 149 | — | S63 | V75 | — | — | — | — | — | — | H83 | — | — | — | — | — | T88 | — | — | Y103 | H104 |
| 150 | — | A63 | V75 | — | — | — | — | — | — | H83 | — | — | — | — | — | L88 | — | — | Y103 | H104 |
| 151 | — | S63 | V75 | — | — | — | — | — | — | H83 | — | — | — | — | — | T88 | — | — | Y103 | H104 |
| 152 | — | S63 | V75 | — | — | — | — | — | — | H83 | — | — | — | — | — | T88 | — | — | Y103 | H104 |
| 153 | — | A63 | V75 | — | — | — | — | — | — | H83 | — | — | — | — | — | L88 | — | — | Y103 | H104 |
| 154 | — | A63 | V75 | — | — | — | — | — | — | H83 | — | — | — | — | — | L88 | — | — | Y103 | H104 |
| 155 | — | S63 | V75 | — | — | — | — | — | — | H83 | — | — | — | — | — | T88 | — | — | Y103 | H104 |
| 156 | — | S63 | V75 | — | — | — | — | — | — | H83 | — | — | — | — | — | L88 | — | — | Y103 | H104 |
| 157 | — | A63 | V75 | — | — | — | — | — | — | H83 | — | — | — | — | — | L88 | — | — | Y103 | H104 |
| 158 | — | S63 | V75 | — | — | — | — | — | — | H83 | — | — | — | — | — | T88 | — | — | Y103 | H104 |
| 159 | — | S63 | V75 | — | — | — | — | — | — | H83 | — | — | — | — | — | T88 | — | — | Y103 | H104 |
| 160 | — | A63 | V75 | — | — | — | — | — | — | H83 | — | — | — | — | — | L88 | — | — | Y103 | H104 |
| 161 | — | A63 | V75 | — | — | — | — | — | — | H83 | — | — | — | — | — | L88 | — | — | Y103 | H104 |
| 162 | — | S63 | V75 | — | — | — | — | — | — | H83 | — | — | — | — | — | T88 | — | — | Y103 | H104 |
| 163 | — | S63 | V75 | — | — | — | — | — | — | H83 | — | — | — | — | — | T88 | — | — | Y103 | H104 |
| 164 | — | S63 | V75 | — | — | — | — | — | — | H83 | — | — | — | — | — | G88 | — | — | Y103 | H104 |
| 165 | — | S63 | V75 | — | — | — | — | — | — | H83 | — | — | — | — | — | T88 | — | — | Y103 | H104 |
| 166 | — | A63 | V75 | — | — | — | — | — | — | H83 | — | — | — | — | — | L88 | — | — | Y103 | H104 |
| 167 | — | S63 | V75 | — | — | — | — | — | — | H83 | — | — | — | — | — | T88 | — | — | Y103 | H104 |
| 168 | — | S63 | V75 | — | — | — | — | — | — | N83 | — | — | — | — | — | L88 | — | — | Y103 | H104 |
| 169 | — | A63 | V75 | — | — | — | — | — | — | H83 | — | — | — | — | — | V88 | — | — | Y103 | H104 |
| 170 | — | S63 | V75 | — | — | — | — | — | — | N83 | — | — | — | — | — | L88 | — | — | Y103 | H104 |
| 171 | — | S63 | V75 | — | — | — | — | — | — | H83 | — | — | — | — | — | L88 | — | — | Y103 | H104 |
| 172 | — | A63 | V75 | — | — | — | — | — | — | H83 | — | — | — | — | — | L88 | — | — | Y103 | H104 |
| 173 | — | A63 | V75 | — | — | — | — | — | — | H83 | — | — | — | — | — | L88 | — | — | Y103 | H104 |
| 174 | — | S63 | V75 | — | — | — | — | — | — | H83 | — | — | — | — | — | L88 | — | — | Y103 | H104 |
| 175 | — | S55 | V67 | — | — | — | — | — | — | H75 | — | — | — | — | — | T80 | — | — | Y95 | H96 |
| 176 | — | S63 | V75 | — | — | — | — | — | — | H83 | — | — | — | — | — | L88 | — | — | Y103 | H104 |
| 177 | — | S63 | V75 | — | — | — | — | — | — | H83 | — | — | — | — | — | L88 | — | — | Y103 | H104 |
| 178 | — | S63 | V75 | — | — | — | — | — | — | H83 | — | — | — | — | — | L88 | — | — | Y103 | H104 |
| 179 | — | A63 | V75 | — | — | — | — | — | — | H83 | — | — | — | — | — | L88 | — | — | Y103 | H104 |
| 180 | — | A61 | V73 | — | — | — | — | — | — | H81 | — | — | — | — | — | T86 | — | — | Y101 | H102 |
| 181 | — | A63 | V75 | — | — | — | — | — | — | H83 | — | — | — | — | — | H88 | — | — | Y103 | H104 |
| 182 | — | A63 | V75 | — | — | — | — | — | — | H83 | — | — | — | — | — | H88 | — | — | Y103 | H104 |
| 183 | — | S63 | V75 | — | — | — | — | — | — | H83 | — | — | — | — | — | L88 | — | — | Y103 | H104 |
| 184 | E46 | R50 | — | Y59 | G60 | H61 | — | — | A83 | — | K96 | — | Y104 | R106 | K107 | — | — | — | I139 | K140 |
| 185 | E46 | R50 | — | Y59 | G60 | H61 | — | — | A83 | — | K96 | — | Y104 | R106 | K107 | — | — | — | I139 | K140 |
| 186 | E46 | R50 | — | Y59 | G60 | H61 | — | — | A83 | — | K96 | — | Y104 | R106 | K107 | — | — | — | I139 | K140 |
| 187 | E46 | R50 | — | Y59 | G60 | H61 | — | — | A83 | — | K96 | — | Y104 | R106 | K107 | — | — | — | L139 | K140 |
| 188 | E46 | R50 | — | Y59 | G60 | H61 | — | — | A83 | — | K96 | — | Y104 | R106 | K107 | — | — | — | I139 | K140 |
| 189 | E46 | R50 | — | Y59 | G60 | H61 | — | — | A83 | — | K96 | — | Y104 | R106 | K107 | — | — | — | L139 | K140 |
| 190 | E46 | R50 | — | Y59 | G60 | H61 | — | — | A83 | — | K96 | — | Y104 | R106 | K107 | — | — | — | I139 | K140 |
| 191 | E46 | R50 | — | Y59 | G60 | H61 | — | — | A83 | — | K96 | — | Y104 | R106 | K107 | — | — | — | I139 | K140 |
| 192 | E46 | R50 | — | Y59 | G60 | H61 | — | — | A83 | — | K96 | — | Y104 | R106 | K107 | — | — | — | L139 | K140 |
| 193 | E46 | R50 | — | Y59 | G60 | H61 | — | — | A83 | — | K96 | — | Y104 | R106 | K107 | — | — | — | I139 | K140 |
| 194 | E46 | R50 | — | Y59 | G60 | H61 | — | — | A83 | — | K96 | — | Y104 | R106 | K107 | — | — | — | I139 | K140 |
| 195 | E46 | R50 | — | Y59 | G60 | H61 | — | — | A83 | — | K96 | — | Y104 | R106 | K107 | — | — | — | I139 | K140 |
| 196 | E46 | R50 | — | Y59 | G60 | H61 | — | — | A83 | — | K96 | — | Y104 | R106 | K107 | — | — | — | I139 | K140 |
| 197 | E46 | R50 | — | Y59 | G60 | H61 | — | — | A83 | — | K96 | — | Y104 | R106 | K107 | — | — | — | I139 | K140 |
| 198 | K46 | R50 | — | Y59 | G60 | H61 | — | — | A83 | — | K96 | — | Y104 | R106 | K107 | — | — | — | I139 | K140 |
| 199 | E46 | R50 | — | Y59 | G60 | H61 | — | — | A83 | — | K96 | — | Y104 | R106 | K107 | — | — | — | I139 | K140 |
| 200 | D46 | R50 | — | Y59 | G60 | H61 | — | — | A83 | — | K96 | — | Y104 | R106 | K107 | — | — | — | I139 | K140 |
| 201 | E26 | R30 | — | Y39 | G40 | H41 | — | — | A63 | — | K76 | — | Y84 | R86 | K87 | — | — | — | I119 | K120 |
| 202 | D46 | R50 | — | Y59 | G60 | H61 | — | — | A83 | — | K96 | — | Y104 | R106 | K107 | — | — | — | I139 | K140 |
| 203 | D46 | R50 | — | Y59 | G60 | H61 | — | — | A83 | — | K96 | — | Y104 | R106 | K107 | — | — | — | I139 | K140 |
| 204 | Q46 | R50 | — | Y59 | G60 | H61 | — | — | A83 | — | K96 | — | Y104 | R106 | K107 | — | — | — | I139 | K140 |
| 205 | D46 | R50 | — | Y59 | G60 | H61 | — | — | A83 | — | K96 | — | Y104 | R106 | K107 | — | — | — | I139 | K140 |
| 206 | D46 | R50 | — | Y59 | G60 | H61 | — | — | A83 | — | K96 | — | Y104 | R106 | K107 | — | — | — | I139 | K140 |
| 207 | D46 | R50 | — | Y59 | G60 | H61 | — | — | A83 | — | K96 | — | Y104 | R106 | K107 | — | — | — | I139 | K140 |
| 208 | Q46 | R50 | — | Y59 | G60 | H61 | — | — | A83 | — | K96 | — | Y104 | R106 | K107 | — | — | — | I139 | K140 |
| 209 | D46 | R50 | — | Y59 | G60 | H61 | — | — | A83 | — | K96 | — | Y104 | R106 | K107 | — | — | — | I139 | K140 |
| 210 | E46 | R50 | — | Y59 | G60 | H61 | — | — | A83 | — | K96 | — | Y104 | R106 | K107 | — | — | — | I139 | K140 |
| 211 | D46 | R50 | — | Y59 | G60 | H61 | — | — | A83 | — | K96 | — | Y104 | R106 | K107 | — | — | — | I139 | K140 |
| 212 | Q46 | R50 | — | Y59 | G60 | H61 | — | — | A83 | — | K96 | — | Y104 | R106 | K107 | — | — | — | I139 | K140 |
| 213 | D46 | R50 | — | Y59 | G60 | H61 | — | — | A83 | — | K96 | — | Y104 | R106 | K107 | — | — | — | I139 | K140 |
| 214 | D46 | R50 | — | Y59 | G60 | H61 | — | — | A83 | — | K96 | — | Y104 | R106 | K107 | — | — | — | I139 | K140 |
| 215 | D46 | R50 | — | Y59 | G60 | H61 | — | — | A83 | — | K96 | — | Y104 | R106 | K107 | — | — | — | I139 | K140 |
| 216 | D46 | R50 | — | Y59 | G60 | H61 | — | — | A83 | — | K96 | — | Y104 | R106 | K107 | — | — | — | I139 | K140 |
| 217 | D46 | R50 | — | Y59 | G60 | H61 | — | — | A83 | — | K96 | — | Y104 | R106 | K107 | — | — | — | I139 | K140 |
| 218 | D46 | R50 | — | Y59 | G60 | H61 | — | — | A83 | — | K96 | — | Y104 | R106 | K107 | — | — | — | I139 | K140 |
| 219 | D46 | R50 | — | Y59 | G60 | H61 | — | — | A83 | — | K96 | — | Y104 | R106 | K107 | — | — | — | I139 | K140 |
| 220 | D46 | R50 | — | Y59 | G60 | H61 | — | — | A83 | — | K96 | — | Y104 | R106 | K107 | — | — | — | I139 | K140 |
| 221 | D46 | R50 | — | Y59 | G60 | H61 | — | — | A83 | — | K96 | — | Y104 | R106 | K107 | — | — | — | I139 | K140 |
| 222 | D46 | R50 | — | Y59 | G60 | H61 | — | — | A83 | — | K96 | — | Y104 | R106 | K107 | — | — | — | I139 | K140 |
| 223 | D46 | R50 | — | Y59 | G60 | H61 | — | — | A83 | — | K96 | — | Y104 | R106 | K107 | — | — | — | I139 | K140 |
| 224 | D46 | R50 | — | Y59 | G60 | H61 | — | — | A83 | — | K96 | — | Y104 | R106 | K107 | — | — | — | I139 | K140 |
| 225 | D46 | R50 | — | Y59 | G60 | H61 | — | — | A83 | — | K96 | — | Y104 | R106 | K107 | — | — | — | I139 | K140 |
| 226 | D46 | R50 | — | Y59 | G60 | H61 | — | — | A83 | — | K96 | — | Y104 | R106 | K107 | — | — | — | I139 | K140 |
| 227 | D46 | R50 | — | Y59 | G60 | H61 | — | — | A83 | — | K96 | — | Y104 | R106 | K107 | — | — | — | I139 | K140 |
| 228 | D46 | R50 | — | Y59 | G60 | H61 | — | — | A83 | — | K96 | — | Y104 | R106 | K107 | — | — | — | I139 | K140 |
| 229 | E46 | R50 | — | Y59 | G60 | H61 | — | — | A83 | — | K96 | — | Y104 | R106 | K107 | — | — | — | I139 | Q140 |
| 230 | D46 | R50 | — | Y59 | G60 | H61 | — | — | A83 | — | K96 | — | Y104 | R106 | K107 | — | — | — | I139 | K140 |
| 231 | D46 | R50 | — | Y59 | G60 | H61 | — | — | A83 | — | K96 | — | Y104 | R106 | K107 | — | — | — | I139 | K140 |
| 232 | — | R50 | — | Y59 | G60 | H61 | — | — | A83 | — | K96 | — | Y104 | R106 | K107 | — | — | — | I139 | K140 |
| 233 | — | S50 | — | Y59 | G60 | H61 | — | — | A83 | — | K96 | — | Y104 | R106 | K107 | — | — | — | I139 | K140 |
| 234 | — | R50 | — | Y59 | G60 | H61 | — | — | A83 | — | K96 | — | Y104 | R106 | K107 | — | — | — | I139 | Q140 |
| 235 | — | S50 | — | Y59 | G60 | H61 | — | — | A83 | — | K96 | — | Y104 | R106 | K107 | — | — | — | I139 | Q140 |
| 236 | — | S50 | — | Y59 | G60 | H61 | — | — | A83 | — | K96 | — | Y104 | R106 | K107 | — | — | — | I139 | Q140 |
| 237 | — | S50 | — | Y59 | G60 | H61 | — | — | A83 | — | K96 | — | Y104 | R106 | K107 | — | — | — | I139 | Q140 |
| 238 | — | R50 | — | Y59 | G60 | H61 | — | — | A83 | — | K96 | — | Y104 | R106 | K107 | — | — | — | I139 | K140 |
| 239 | — | S50 | — | Y59 | G60 | H61 | — | — | A83 | — | K96 | — | Y104 | R106 | K107 | — | — | — | I139 | Q140 |
| 240 | — | S50 | — | Y59 | G60 | H61 | — | — | A83 | — | K96 | — | Y104 | R106 | K107 | — | — | — | I139 | Q140 |
| 241 | — | S50 | — | Y59 | G60 | H61 | — | — | A83 | — | K96 | — | Y104 | R106 | K107 | — | — | — | I139 | Q140 |
| 242 | — | S50 | — | Y59 | G60 | H61 | — | — | A83 | — | K96 | — | Y104 | R106 | K107 | — | — | — | I139 | Q140 |
| 243 | — | S50 | — | Y59 | G60 | H61 | — | — | A83 | — | K96 | — | Y104 | R106 | K107 | — | — | — | I139 | Q140 |
| 244 | — | S50 | — | Y59 | G60 | H61 | — | — | A83 | — | K96 | — | Y104 | R106 | K107 | — | — | — | I139 | Q140 |
| 245 | — | R50 | — | Y59 | G60 | H61 | — | — | A83 | — | K96 | — | Y104 | R106 | K107 | — | — | — | I139 | Q140 |
| 246 | — | S50 | — | Y59 | G60 | H61 | — | — | A83 | — | K96 | — | Y104 | R106 | K107 | — | — | — | I139 | Q140 |
| 247 | — | S50 | — | Y59 | G60 | H61 | — | — | A83 | — | K96 | — | Y104 | R106 | K107 | — | — | — | I139 | Q140 |
| 248 | — | S50 | — | Y59 | G60 | H61 | — | — | A83 | — | K96 | — | Y104 | R106 | K107 | — | — | — | I139 | Q140 |
| 249 | — | R56 | — | Y65 | G66 | H67 | — | — | A89 | — | K102 | — | Y110 | R112 | K113 | — | — | — | I145 | K146 |
| 250 | — | S50 | — | Y59 | G60 | H61 | — | — | A83 | — | K96 | — | Y104 | R106 | K107 | — | — | — | I139 | Q140 |
| 251 | — | R40 | — | Y49 | G50 | H51 | — | — | A73 | — | K86 | — | Y94 | R96 | K97 | — | — | — | I129 | K130 |
| 252 | — | R50 | — | Y59 | G60 | H61 | — | — | A83 | — | K96 | — | Y104 | R106 | K107 | — | — | — | I139 | R140 |
| 253 | — | R50 | — | Y59 | G60 | H61 | — | — | A83 | — | K96 | — | Y104 | R106 | K107 | — | — | — | I139 | R140 |
| 254 | — | R50 | — | Y59 | G60 | H61 | — | — | A83 | — | K96 | — | Y104 | R106 | K107 | — | — | — | I139 | R140 |
| 255 | — | R50 | — | Y59 | G60 | H61 | — | — | A83 | — | K96 | — | Y104 | R106 | K107 | — | — | — | I139 | R140 |
| 256 | — | R50 | — | Y59 | G60 | H61 | — | — | A83 | — | K96 | — | Y104 | R106 | K107 | — | — | — | I139 | R140 |
| 257 | — | R50 | — | Y59 | G60 | H61 | — | — | A83 | — | K96 | — | Y104 | R106 | K107 | — | — | — | I139 | R140 |
| 258 | — | R50 | — | Y59 | G60 | H61 | — | — | A83 | — | K96 | — | Y104 | R106 | K107 | — | — | — | I139 | R140 |
| 259 | — | R50 | — | Y59 | G60 | H61 | — | — | A83 | — | K96 | — | Y104 | R106 | K107 | — | — | — | I139 | R140 |
| 260 | — | R50 | — | Y59 | G60 | H61 | — | — | A83 | — | K96 | — | Y104 | R106 | K107 | — | — | — | I139 | R140 |
| 261 | — | R50 | — | Y59 | G60 | H61 | — | — | A83 | — | K96 | — | Y104 | R106 | K107 | — | — | — | I139 | R140 |
| 262 | — | R50 | — | Y59 | G60 | H61 | — | — | A83 | — | K96 | — | Y104 | R106 | K107 | — | — | — | I139 | R140 |
| 263 | — | R50 | — | Y59 | G60 | H61 | — | — | A83 | — | K96 | — | Y104 | R106 | K107 | — | — | — | I139 | R140 |
| 264 | — | R50 | — | Y59 | G60 | H61 | — | — | A83 | — | K96 | — | Y104 | R106 | K107 | — | — | — | I139 | R140 |
| 265 | — | R50 | — | Y59 | G60 | H61 | — | — | A83 | — | K96 | — | Y104 | R106 | K107 | — | — | — | I139 | R140 |
| 266 | — | R50 | — | Y59 | G60 | H61 | — | — | A83 | — | K96 | — | Y104 | R106 | K107 | — | — | — | I139 | R140 |
| 267 | — | R50 | — | Y59 | G60 | H61 | — | — | A83 | — | K96 | — | Y104 | R106 | K107 | — | — | — | I139 | R140 |
| 268 | — | R50 | — | Y59 | G60 | H61 | — | — | A83 | — | K96 | — | Y104 | R106 | K107 | — | — | — | I139 | R140 |
| 269 | — | R50 | — | Y59 | G60 | H61 | — | — | A83 | — | K96 | — | Y104 | R106 | K107 | — | — | — | I139 | R140 |
| 270 | — | R50 | — | Y59 | G60 | H61 | — | — | A83 | — | K96 | — | Y104 | R106 | K107 | — | — | — | I139 | R140 |
| 271 | — | R50 | — | Y59 | G60 | H61 | — | — | A83 | — | K96 | — | Y104 | R106 | K107 | — | — | — | I139 | R140 |
| 272 | — | R50 | — | Y59 | G60 | H61 | — | — | A83 | — | K96 | — | Y104 | R106 | K107 | — | — | — | I139 | R140 |
| 273 | — | R50 | — | Y59 | G60 | H61 | — | — | A83 | — | K96 | — | Y104 | R106 | K107 | — | — | — | I139 | R140 |
| 274 | — | R50 | — | Y59 | G60 | H61 | — | — | A83 | — | K96 | — | Y104 | R106 | K107 | — | — | — | I139 | R140 |
| 275 | — | G127 | — | — | — | — | Y170 | R176 | G183 | C198 | — | G206 | Y209 | D211 | A212 | E218 | — | R237 | F253 | G254 |
| 276 | — | G127 | — | — | — | — | Y170 | R176 | G183 | C198 | — | G206 | Y209 | D211 | A212 | E218 | — | R237 | F253 | G254 |
| 277 | — | G127 | — | — | — | — | Y170 | R176 | G183 | C198 | — | G206 | Y209 | D211 | A212 | E218 | — | R237 | F253 | G254 |
| 278 | — | G127 | — | — | — | — | Y170 | R176 | G183 | C198 | — | G206 | Y209 | D211 | A212 | G218 | — | R237 | F253 | G254 |
| 279 | — | G127 | — | — | — | — | Y170 | R176 | G183 | C198 | — | G206 | Y209 | E211 | A212 | E218 | — | R237 | F253 | G254 |
| 280 | — | G127 | — | — | — | — | Y170 | R176 | G183 | C198 | — | G206 | Y209 | G211 | A212 | E218 | — | R237 | F253 | G254 |
| 281 | — | G127 | — | — | — | — | Y170 | R176 | G183 | C198 | — | G206 | Y209 | E211 | A212 | E218 | — | R237 | F253 | G254 |
| 282 | — | G127 | — | — | — | — | Y170 | R176 | G183 | C198 | — | G206 | Y209 | D211 | A212 | E218 | — | R237 | F253 | G254 |
| 283 | — | G127 | — | — | — | — | Y170 | R176 | G183 | C198 | — | G206 | Y209 | E211 | A212 | E218 | — | R237 | F253 | G254 |
| 284 | — | G127 | — | — | — | — | Y170 | R176 | G183 | C198 | — | G206 | Y209 | D211 | A212 | E218 | — | R237 | F253 | G254 |
| 285 | — | G127 | — | — | — | — | Y170 | R176 | G183 | C198 | — | G206 | F209 | D211 | A212 | K218 | — | R237 | F253 | G254 |
| 286 | — | G127 | — | — | — | — | Y170 | R176 | G183 | C198 | — | G206 | F209 | D211 | A212 | E218 | — | R237 | F253 | G254 |
| 287 | — | G127 | — | — | — | — | Y170 | R176 | G183 | C198 | — | G206 | F209 | D211 | A212 | E218 | — | R237 | F253 | G254 |
| 288 | — | G127 | — | — | — | — | Y170 | R176 | G183 | C198 | — | G206 | F209 | D211 | A212 | E218 | — | R237 | F253 | G254 |
| 289 | — | G127 | — | — | — | — | Y170 | R176 | G183 | A198 | — | G206 | Y209 | D211 | A212 | E218 | — | R237 | F253 | G254 |
| 290 | — | G127 | — | — | — | — | Y170 | R176 | G183 | C198 | — | G206 | Y209 | D211 | A212 | A218 | — | R237 | F253 | G254 |
| 291 | — | G127 | — | — | — | — | Y170 | R176 | G183 | C198 | — | G206 | Y209 | D211 | A212 | E218 | — | R237 | F253 | G254 |
| 292 | — | G130 | — | — | — | — | Y173 | R179 | G186 | C201 | — | A209 | F212 | D214 | A215 | E221 | — | R240 | F256 | G257 |
| 293 | — | G128 | — | — | — | — | Y171 | R177 | G184 | S199 | — | G207 | F210 | K212 | A213 | E219 | — | R238 | F254 | G255 |
| 294 | — | G130 | — | — | — | — | Y173 | R179 | G186 | C201 | — | G209 | Y212 | D214 | A215 | A221 | — | R240 | F256 | G257 |
| 295 | — | G129 | — | — | — | — | Y172 | R178 | G185 | S200 | — | G208 | Y211 | D213 | A214 | Q220 | — | R239 | F255 | G256 |
| 296 | — | G129 | — | — | — | — | Y172 | R178 | G185 | S200 | — | G208 | Y211 | D213 | A214 | A220 | — | R239 | F255 | G256 |
| 297 | — | G129 | — | — | — | — | Y172 | R178 | G185 | S200 | — | G208 | Y211 | D213 | A214 | A220 | — | R239 | F255 | G256 |
| 298 | — | G129 | — | — | — | — | Y172 | R178 | G185 | C200 | — | G208 | Y211 | D213 | A214 | E220 | — | R239 | F255 | G256 |
| 299 | — | G134 | — | — | — | — | Y177 | R183 | G190 | A205 | — | G213 | Y216 | D218 | A219 | E225 | — | R244 | F260 | G261 |
| 300 | — | G133 | — | — | — | — | Y176 | R182 | G189 | S204 | — | G212 | F215 | D217 | A218 | E224 | — | R243 | F259 | G260 |
| 301 | — | G129 | — | — | — | — | Y172 | R178 | G185 | S200 | — | G208 | Y211 | Q213 | A214 | E220 | — | R239 | F255 | G256 |

TABLE 2b-3

| | Pos | Pos | Pos | Pos | Pos | Pos | Pos | Pos | Pos | Pos | Pos | Pos | Pos | Pos | Pos | Pos |
|---|---|---|---|---|---|---|---|---|---|---|---|---|---|---|---|---|
| ID | 41 | 42 | 43 | 44 | 45 | 46 | 47 | 48 | 49 | 50 | 51 | 52 | 53 | 54 | 55 | 56 |
| 1 | T419 | F420 | A432 | T434 | K438 | L449 | T451 | F462 | Y470 | S476 | V477 | D482 | Y493 | K498 | E515 | K528 |
| 2 | T352 | F353 | S365 | A367 | Q371 | L382 | V384 | H395 | Y403 | T409 | V410 | D415 | F426 | R431 | D448 | H461 |
| 3 | T352 | F353 | L365 | E367 | E371 | L382 | I384 | R395 | Y403 | A409 | V410 | H415 | L426 | M431 | R448 | G461 |
| 4 | T352 | F353 | S365 | A367 | Q371 | L382 | V384 | H395 | Y403 | T409 | V410 | D415 | F426 | R431 | D448 | H461 |
| 5 | T352 | F353 | L365 | E367 | E371 | L382 | I384 | R395 | Y403 | A409 | V410 | H415 | L426 | M431 | R448 | G461 |
| 6 | A365 | F366 | G378 | D380 | L384 | L395 | I397 | R408 | Y416 | E422 | L423 | S428 | L439 | R444 | E461 | — |
| 7 | V345 | F346 | P358 | T360 | L364 | L375 | I377 | H388 | Y396 | K402 | V403 | T408 | L419 | R424 | N441 | — |
| 8 | C360 | F361 | W373 | E375 | V379 | L390 | I392 | R403 | Y411 | Q417 | R418 | D423 | L434 | R439 | Q456 | — |
| 9 | V367 | M368 | L380 | A382 | L386 | L397 | V399 | F410 | Y418 | H424 | F425 | A430 | M441 | R446 | E463 | — |
| 10 | L355 | F356 | M368 | K370 | I374 | M385 | I387 | L398 | Y406 | E412 | H413 | E418 | L429 | R434 | K451 | — |
| 11 | T384 | F385 | A397 | F399 | K403 | V414 | V416 | F427 | Y435 | E441 | F442 | E447 | Y458 | R463 | E480 | K493 |
| 12 | T394 | F395 | A407 | T409 | K413 | L424 | A426 | Y437 | Y445 | A451 | V452 | D457 | Y468 | K473 | D490 | K503 |
| 13 | A371 | F372 | G384 | D386 | V390 | L401 | I403 | R414 | Y422 | A428 | R429 | D434 | L445 | R450 | E467 | — |
| 14 | V357 | F358 | A370 | D372 | E376 | L387 | V389 | R400 | L408 | E414 | T415 | R420 | L429 | L434 | E451 | — |
| 15 | T399 | F400 | R412 | K414 | L418 | I429 | V431 | Y442 | Y450 | N456 | V457 | Q462 | Y473 | R478 | E495 | K508 |
| 16 | T399 | F400 | R412 | K414 | L418 | I429 | V431 | Y442 | Y450 | N456 | V457 | Q462 | Y473 | R478 | E495 | K508 |
| 17 | T393 | F394 | A406 | T408 | K412 | L423 | V425 | Y436 | Y444 | S450 | V451 | D456 | Y467 | R472 | D489 | K502 |
| 18 | A347 | F348 | R359 | P361 | E365 | L376 | I378 | L389 | Y397 | Q403 | R404 | H409 | L420 | Q425 | R442 | — |
| 19 | T397 | F398 | A410 | T412 | K416 | L427 | V429 | Y440 | Y448 | S454 | V455 | D460 | Y471 | R476 | D493 | K506 |
| 20 | T389 | F390 | A402 | T404 | R408 | L419 | A421 | Y432 | Y440 | S446 | V447 | D452 | F463 | K468 | D485 | T498 |
| 21 | T357 | L358 | R370 | D372 | I376 | L387 | I389 | R400 | Y408 | E414 | R415 | V420 | F431 | R436 | E453 | A466 |
| 22 | T389 | F390 | A402 | T404 | T408 | L419 | A421 | F432 | Y440 | S446 | V447 | D452 | Y463 | R468 | D485 | S498 |
| 23 | T358 | L359 | Q371 | E373 | I377 | L388 | I390 | R401 | Y409 | E415 | R416 | E421 | L432 | R437 | E454 | A467 |
| 24 | T395 | F396 | A408 | T410 | K414 | L425 | A427 | Y438 | F446 | S452 | V453 | D458 | Y469 | K474 | D491 | K504 |
| 25 | T432 | F433 | A445 | T447 | K451 | L462 | V464 | Y475 | Y483 | S489 | V490 | E495 | Y506 | K511 | D528 | N541 |
| 26 | T363 | F364 | A376 | T378 | K382 | L393 | V395 | Y406 | Y414 | S420 | V421 | D426 | Y437 | R442 | D459 | K472 |
| 27 | V332 | Y333 | Y345 | D347 | V351 | V362 | I364 | R374 | Y382 | R388 | Y389 | N394 | L405 | L410 | K427 | V440 |
| 28 | V355 | M356 | K368 | E370 | T374 | M385 | I387 | R398 | Y406 | E412 | K413 | F418 | F429 | Y434 | E451 | — |
| 29 | L354 | F355 | E367 | R369 | L373 | M384 | I386 | F397 | Y405 | E411 | H412 | D417 | I428 | R433 | N450 | — |
| 30 | T432 | F433 | A445 | T447 | K451 | L462 | V464 | Y475 | Y483 | S489 | V490 | E495 | Y506 | K511 | D528 | N541 |
| 31 | V355 | M356 | L368 | D370 | V374 | M385 | I387 | K398 | Y406 | E412 | R413 | F418 | L429 | Y434 | R451 | — |
| 32 | A345 | F346 | R357 | D359 | L363 | L374 | I376 | T387 | Y395 | D401 | R402 | D407 | F418 | R423 | Q440 | — |
| 33 | I331 | Y332 | Y344 | D346 | M350 | L361 | L363 | R373 | Y381 | R387 | Y388 | E393 | I404 | L409 | Q426 | — |
| 34 | T336 | F337 | H349 | D351 | V355 | Y366 | I368 | R379 | Y387 | P393 | L394 | S399 | V408 | H413 | V430 | — |
| 35 | A345 | F346 | R357 | D359 | L363 | L374 | I376 | V387 | Y395 | D401 | R402 | D407 | F418 | Q423 | Q440 | — |
| 36 | V352 | M353 | C365 | E367 | R371 | L382 | V384 | Y395 | Y403 | K409 | L410 | E415 | I426 | L431 | R448 | — |
| 37 | S366 | M367 | L379 | D381 | V385 | M396 | I398 | R409 | Y417 | R423 | R424 | E429 | L440 | Y445 | D462 | — |
| 38 | S350 | M351 | L363 | D365 | I369 | L380 | I382 | R393 | Y401 | D407 | K408 | E413 | L424 | Y429 | E446 | — |
| 39 | S364 | M365 | L377 | D379 | T383 | M394 | I396 | R407 | Y415 | T421 | R422 | E427 | L438 | Y443 | G460 | — |
| 40 | S364 | M365 | L377 | D379 | T383 | M394 | I396 | R407 | Y415 | T421 | R422 | E427 | L438 | Y443 | G460 | — |
| 41 | V331 | F332 | L344 | E346 | E350 | L361 | I363 | K373 | Y381 | R387 | F388 | Q393 | L404 | L409 | Q426 | — |
| 42 | T362 | M363 | L375 | A377 | Q381 | M392 | I394 | R405 | Y413 | A419 | R420 | E425 | L436 | F441 | S458 | — |
| 43 | S364 | M365 | L377 | D379 | M383 | M394 | I396 | R407 | Y415 | K421 | R422 | Q427 | L438 | Y443 | D460 | — |
| 44 | S339 | F340 | L352 | E354 | E358 | L369 | I371 | G382 | Y390 | K395 | K396 | S401 | F411 | T416 | L433 | — |
| 45 | S366 | M367 | L379 | D381 | Q385 | M396 | I398 | R409 | Y417 | K423 | R424 | L429 | L440 | Y445 | N462 | — |
| 46 | I352 | F353 | L365 | D367 | S371 | L382 | I384 | R397 | Y405 | L411 | R412 | R417 | L428 | H433 | R450 | A463 |
| 47 | C355 | L356 | R368 | E370 | V374 | A385 | L387 | R398 | Y406 | E412 | R413 | E418 | L429 | Y434 | E451 | A464 |
| 48 | T350 | I351 | K363 | D365 | I369 | L380 | I382 | R393 | Y401 | K407 | I408 | E413 | I424 | L429 | D446 | — |
| 49 | I352 | F353 | L365 | D367 | S371 | L382 | I384 | R397 | Y405 | L411 | R412 | R417 | L428 | H433 | R450 | A463 |
| 50 | C353 | L354 | L366 | E368 | A372 | A383 | V385 | R396 | Y404 | E410 | R411 | D416 | L427 | Y432 | E449 | — |
| 51 | I352 | F353 | L365 | D367 | S371 | L382 | I384 | R397 | Y405 | L411 | R412 | R417 | L428 | H433 | R450 | A463 |
| 52 | I364 | F365 | S377 | D379 | E383 | F394 | L396 | R407 | Y415 | S421 | R422 | R427 | L436 | L441 | K458 | — |
| 53 | T348 | F349 | H361 | D363 | A367 | F378 | I380 | R392 | Y400 | S406 | A407 | K412 | V421 | Y426 | D443 | — |
| 54 | A375 | F376 | W388 | D390 | L394 | L405 | I407 | R418 | Y426 | G432 | R433 | E438 | L449 | Y454 | D471 | P484 |
| 55 | S366 | M367 | M379 | D381 | L385 | M396 | I398 | R409 | Y417 | E423 | R424 | E429 | L440 | Y445 | D462 | — |
| 56 | V331 | F332 | L344 | E346 | E350 | L361 | I363 | K373 | Y381 | R387 | F388 | Q393 | L404 | L409 | Q426 | — |
| 57 | A375 | F376 | W388 | D390 | L394 | L405 | I407 | R418 | Y426 | G432 | R433 | E438 | L449 | Y454 | D471 | P484 |
| 58 | T352 | F353 | R365 | N367 | I371 | L382 | L384 | R395 | Y403 | E409 | I410 | D415 | F426 | R431 | E448 | — |
| 59 | V357 | F358 | A370 | D372 | E376 | L387 | V389 | R400 | L408 | E414 | T415 | R420 | L429 | L434 | E451 | — |
| 60 | T358 | F359 | A371 | R373 | K377 | L388 | T390 | Y401 | Y409 | S415 | V416 | E421 | Y432 | K437 | E454 | K467 |
| 61 | T420 | F421 | A433 | T435 | K439 | L450 | T452 | F463 | Y471 | S477 | V478 | D483 | Y494 | K499 | E516 | K529 |
| 62 | T383 | F384 | A396 | T398 | K402 | L413 | V415 | Y426 | Y434 | S440 | V441 | A446 | Y457 | K462 | D479 | N492 |
| 63 | T383 | F384 | A396 | T398 | K402 | L413 | V415 | Y426 | Y434 | S440 | V441 | A446 | Y457 | K462 | D479 | N492 |
| 64 | T388 | F389 | A401 | R403 | K407 | L418 | A420 | C431 | Y439 | S445 | V446 | D451 | Y462 | K467 | D484 | T497 |
| 65 | V361 | F362 | A374 | D376 | L380 | L391 | V393 | R404 | S412 | E418 | R419 | E424 | L433 | L438 | E455 | — |
| 66 | T432 | F433 | A445 | T447 | K451 | L462 | V464 | Y475 | Y483 | S489 | V490 | E495 | Y506 | K511 | D528 | N541 |
| 67 | S397 | F398 | A410 | T412 | K416 | L427 | V429 | H440 | Y448 | L454 | V455 | A460 | Y471 | K476 | D493 | D506 |
| 68 | T430 | F431 | A443 | T445 | K449 | L460 | V462 | Y473 | Y481 | S487 | V488 | E493 | Y504 | K509 | E526 | N539 |
| 69 | T399 | F400 | A412 | T414 | K418 | L429 | V431 | H442 | Y450 | L456 | A457 | G462 | Y473 | K478 | D495 | — |
| 70 | S441 | F442 | A454 | T456 | K460 | L471 | I473 | H484 | Y492 | L498 | V499 | A504 | Y515 | K520 | E537 | D550 |
| 71 | T376 | F377 | S389 | L391 | Q395 | L406 | V408 | Y419 | Y427 | S433 | V434 | D439 | F450 | R455 | D472 | T485 |
| 72 | S396 | F397 | A409 | T411 | K415 | L426 | V428 | H439 | Y447 | L453 | V454 | A459 | Y470 | K475 | D492 | D505 |
| 73 | I352 | F353 | L365 | D367 | S371 | L382 | I384 | R397 | Y405 | L411 | R412 | R417 | L428 | H433 | R450 | A463 |
| 74 | S407 | F408 | A420 | T422 | K426 | L437 | V439 | H450 | Y458 | L464 | V465 | A470 | Y481 | M486 | K493 | — |
| 75 | T352 | F353 | S365 | A367 | Q371 | L382 | V384 | H395 | Y403 | T409 | V410 | D415 | F426 | R431 | D448 | T453 |
| 76 | T352 | F353 | L365 | E367 | E371 | L382 | I384 | R395 | Y403 | A409 | V410 | H415 | L426 | M431 | R448 | G468 |
| 77 | D365 | L366 | L378 | I380 | K384 | L395 | N400 | V413 | K432 | N438 | D439 | L444 | F449 | T454 | R474 | N481 |
| 78 | G344 | W345 | M357 | L359 | K363 | L374 | N379 | H392 | E411 | D417 | H418 | L423 | F433 | T438 | — | — |
| 79 | I414 | K415 | I437 | L439 | R441 | T452 | H462 | F475 | F495 | A501 | R502 | L507 | M519 | A524 | E542 | K569 |
| 80 | T704 | I705 | P718 | M720 | R728 | T753 | R763 | S776 | F795 | K816 | R817 | L822 | L836 | Q843 | R871 | K898 |
| 81 | V442 | M443 | P456 | E458 | V462 | L473 | I475 | L486 | Y494 | T500 | R501 | H506 | V519 | M524 | R541 | R565 |
| 82 | — | L222 | — | — | — | L233 | I235 | — | — | — | — | — | — | — | — | — |
| 83 | V390 | M391 | P401 | L403 | — | L414 | W416 | E429 | P437 | E443 | R444 | R449 | V463 | V468 | — | M494 |
| 84 | F105 | V106 | A118 | — | — | — | — | F125 | — | — | — | — | L137 | — | V140 | — |
| 85 | F105 | V106 | A118 | — | — | — | — | F125 | — | — | — | — | L137 | — | V140 | — |
| 86 | F105 | V106 | A118 | — | — | — | — | F125 | — | — | — | — | L137 | — | V140 | — |
| 87 | F105 | V106 | A118 | — | — | — | — | F125 | — | — | — | — | L137 | — | V140 | — |
| 88 | F105 | V106 | A118 | — | — | — | — | F125 | — | — | — | — | L137 | — | V140 | — |
| 89 | F105 | V106 | A118 | — | — | — | — | F125 | — | — | — | — | L137 | — | V140 | — |
| 90 | F105 | V106 | A118 | — | — | — | — | F125 | — | — | — | — | L137 | — | V140 | — |
| 91 | F105 | V106 | A118 | — | — | — | — | F125 | — | — | — | — | L137 | — | V140 | — |
| 92 | F105 | V106 | A118 | — | — | — | — | F125 | — | — | — | — | L137 | — | V140 | — |
| 93 | F105 | V106 | A118 | — | — | — | — | F125 | — | — | — | — | L137 | — | V140 | — |
| 94 | F105 | I106 | A118 | — | — | — | — | F125 | — | — | — | — | L137 | — | V140 | — |
| 95 | L105 | V106 | A118 | — | — | — | — | F125 | — | — | — | — | L137 | — | V140 | — |
| 96 | F105 | V106 | A118 | — | — | — | — | F125 | — | — | — | — | L137 | — | V140 | — |
| 97 | L105 | V106 | A118 | — | — | — | — | F125 | — | — | — | — | L137 | — | V140 | — |
| 98 | F105 | V106 | A118 | — | — | — | — | F125 | — | — | — | — | L137 | — | V140 | — |
| 99 | L105 | V106 | A118 | — | — | — | — | F125 | — | — | — | — | L137 | — | V140 | — |
| 100 | F105 | V106 | A118 | — | — | — | — | F125 | — | — | — | — | L137 | — | V140 | — |
| 101 | F105 | V106 | A118 | — | — | — | — | F125 | — | — | — | — | L137 | — | I140 | — |
| 102 | F105 | V106 | A118 | — | — | — | — | F125 | — | — | — | — | L137 | — | I140 | — |
| 103 | F105 | V106 | A118 | — | — | — | — | F125 | — | — | — | — | L137 | — | V140 | — |
| 104 | F105 | V106 | A118 | — | — | — | — | F125 | — | — | — | — | L137 | — | I140 | — |
| 105 | F105 | V106 | A118 | — | — | — | — | F125 | — | — | — | — | L137 | — | V140 | — |
| 106 | F105 | V106 | A118 | — | — | — | — | F125 | — | — | — | — | L137 | — | V140 | — |
| 107 | F105 | V106 | A118 | — | — | — | — | F125 | — | — | — | — | L137 | — | I140 | — |
| 108 | L105 | V106 | A118 | — | — | — | — | F125 | — | — | — | — | L137 | — | V140 | — |
| 109 | L105 | V106 | A118 | — | — | — | — | F125 | — | — | — | — | L137 | — | V140 | — |
| 110 | L105 | V106 | A118 | — | — | — | — | F125 | — | — | — | — | L137 | — | V140 | — |
| 111 | L105 | V106 | A118 | — | — | — | — | F125 | — | — | — | — | L137 | — | V140 | — |
| 112 | L105 | V106 | A118 | — | — | — | — | F125 | — | — | — | — | L137 | — | V140 | — |
| 113 | F105 | V106 | A118 | — | — | — | — | F125 | — | — | — | — | L137 | — | I140 | — |
| 114 | F105 | V106 | A118 | — | — | — | — | F125 | — | — | — | — | L137 | — | V140 | — |
| 115 | F105 | V106 | A118 | — | — | — | — | F125 | — | — | — | — | L137 | — | V140 | — |
| 116 | L105 | V106 | A118 | — | — | — | — | F125 | — | — | — | — | L137 | — | V140 | — |
| 117 | L105 | V106 | A118 | — | — | — | — | F125 | — | — | — | — | L137 | — | V140 | — |
| 118 | L105 | V106 | A118 | — | — | — | — | F125 | — | — | — | — | L137 | — | V140 | — |
| 119 | F105 | V106 | A118 | — | — | — | — | F125 | — | — | — | — | L137 | — | V140 | — |
| 120 | L105 | V106 | A118 | — | — | — | — | F125 | — | — | — | — | L137 | — | V140 | — |
| 121 | F105 | V106 | A118 | — | — | — | — | F125 | — | — | — | — | L137 | — | V140 | — |
| 122 | L105 | V106 | A118 | — | — | — | — | F125 | — | — | — | — | L137 | — | V140 | — |
| 123 | L105 | V106 | A118 | — | — | — | — | F125 | — | — | — | — | L137 | — | V140 | — |
| 124 | L105 | V106 | A118 | — | — | — | — | F125 | — | — | — | — | L137 | — | V140 | — |
| 125 | F105 | V106 | A118 | — | — | — | — | F125 | — | — | — | — | L137 | — | I140 | — |
| 126 | L105 | V106 | A118 | — | — | — | — | F125 | — | — | — | — | L137 | — | V140 | — |
| 127 | L105 | V106 | A118 | — | — | — | — | F125 | — | — | — | — | L137 | — | V140 | — |
| 128 | F105 | V106 | A118 | — | — | — | — | F125 | — | — | — | — | L137 | — | V140 | — |
| 129 | L105 | V106 | A118 | — | — | — | — | F125 | — | — | — | — | L137 | — | V140 | — |
| 130 | L105 | V106 | A118 | — | — | — | — | F125 | — | — | — | — | L137 | — | V140 | — |
| 131 | F105 | V106 | A118 | — | — | — | — | F125 | — | — | — | — | L137 | — | V140 | — |
| 132 | L105 | V106 | A118 | — | — | — | — | F125 | — | — | — | — | L137 | — | V140 | — |
| 133 | L105 | V106 | A118 | — | — | — | — | F125 | — | — | — | — | L137 | — | V140 | — |
| 134 | L105 | V106 | A118 | — | — | — | — | F125 | — | — | — | — | L137 | — | V140 | — |
| 135 | L105 | V106 | A118 | — | — | — | — | F125 | — | — | — | — | L137 | — | V140 | — |
| 136 | F105 | A106 | A118 | — | — | — | — | F125 | — | — | — | — | L137 | — | V140 | — |
| 137 | L105 | A106 | A118 | — | — | — | — | F125 | — | — | — | — | L137 | — | V140 | — |
| 138 | L105 | V106 | A118 | — | — | — | — | F125 | — | — | — | — | L137 | — | V140 | — |
| 139 | L105 | V106 | A118 | — | — | — | — | F125 | — | — | — | — | L137 | — | V140 | — |
| 140 | L105 | V106 | A118 | — | — | — | — | F125 | — | — | — | — | L137 | — | V140 | — |
| 141 | L105 | V106 | A118 | — | — | — | — | F125 | — | — | — | — | L137 | — | V140 | — |
| 142 | F105 | V106 | A118 | — | — | — | — | F125 | — | — | — | — | L137 | — | V140 | — |
| 143 | L105 | V106 | A118 | — | — | — | — | F125 | — | — | — | — | L137 | — | V140 | — |
| 144 | F105 | V106 | A118 | — | — | — | — | F125 | — | — | — | — | L137 | — | V140 | — |
| 145 | L105 | V106 | A118 | — | — | — | — | F125 | — | — | — | — | L137 | — | V140 | — |
| 146 | L105 | V106 | A118 | — | — | — | — | F125 | — | — | — | — | L137 | — | V140 | — |
| 147 | L105 | V106 | A118 | — | — | — | — | F125 | — | — | — | — | L137 | — | V140 | — |
| 148 | L105 | V106 | A118 | — | — | — | — | F125 | — | — | — | — | L137 | — | V140 | — |
| 149 | L105 | V106 | A118 | — | — | — | — | F125 | — | — | — | — | L137 | — | V140 | — |
| 150 | L105 | V106 | A118 | — | — | — | — | F125 | — | — | — | N130 | L137 | — | V140 | — |
| 151 | L105 | A106 | A118 | — | — | — | — | F125 | — | — | — | N130 | L137 | — | V140 | — |
| 152 | L105 | V106 | A118 | — | — | — | — | F125 | — | — | — | N130 | L137 | — | V140 | — |
| 153 | L105 | I106 | A118 | — | — | — | — | F125 | — | — | — | N130 | L137 | — | V140 | — |
| 154 | L105 | M106 | A118 | — | — | — | — | F125 | — | — | — | N130 | L137 | — | V140 | — |
| 155 | L105 | V106 | A118 | — | — | — | — | F125 | — | — | — | N130 | L137 | — | V140 | — |
| 156 | F105 | V106 | A118 | — | — | — | — | F125 | — | — | — | N130 | L137 | — | V140 | — |
| 157 | L105 | V106 | A118 | — | — | — | — | F125 | — | — | — | N130 | L137 | — | V140 | — |
| 158 | L105 | V106 | A118 | — | — | — | — | F125 | — | — | — | N130 | L137 | — | V140 | — |
| 159 | L105 | A106 | A118 | — | — | — | — | F125 | — | — | — | N130 | L137 | — | V140 | — |
| 160 | L105 | V106 | A118 | — | — | — | — | F125 | — | — | — | N130 | L137 | — | V140 | — |
| 161 | L105 | V106 | A118 | — | — | — | — | F125 | — | — | — | N130 | L137 | — | V140 | — |
| 162 | L105 | V106 | A118 | — | — | — | — | F125 | — | — | — | N130 | L137 | — | V140 | — |
| 163 | L105 | V106 | A118 | — | — | — | — | F125 | — | — | — | N130 | L137 | — | V140 | — |
| 164 | F105 | V106 | A118 | — | — | — | — | F125 | — | — | — | N130 | L137 | — | V140 | — |
| 165 | L105 | A106 | A118 | — | — | — | — | F125 | — | — | — | N130 | L137 | — | V140 | — |
| 166 | L105 | I106 | A118 | — | — | — | — | F125 | — | — | — | N130 | L137 | — | V140 | — |
| 167 | L105 | V106 | A118 | — | — | — | — | F125 | — | — | — | N130 | L137 | — | V140 | — |
| 168 | L105 | V106 | A118 | — | — | — | — | F125 | — | — | — | N130 | L137 | — | I140 | — |
| 169 | L105 | V106 | A118 | — | — | — | — | F125 | — | — | — | N130 | L137 | — | V140 | — |
| 170 | L105 | V106 | A118 | — | — | — | — | F125 | — | — | — | N130 | L137 | — | I140 | — |
| 171 | L105 | V106 | A118 | — | — | — | — | F125 | — | — | — | N130 | L137 | — | V140 | — |
| 172 | F105 | V106 | A118 | — | — | — | — | F125 | — | — | — | N130 | L137 | — | V140 | — |
| 173 | F105 | V106 | A118 | — | — | — | — | F125 | — | — | — | N130 | L137 | — | I140 | — |
| 174 | F105 | V106 | A118 | — | — | — | — | F125 | — | — | — | N130 | L137 | — | V140 | — |
| 175 | L97 | V98 | A110 | — | — | — | — | F117 | — | — | — | N122 | L129 | — | V132 | — |
| 176 | F105 | V106 | A118 | — | — | — | — | F125 | — | — | — | N130 | L137 | — | V140 | — |
| 177 | L105 | V106 | A118 | — | — | — | — | F125 | — | — | — | N130 | L137 | — | V140 | — |
| 178 | F105 | V106 | P118 | — | — | — | — | F125 | — | — | — | N130 | L137 | — | V140 | — |
| 179 | F105 | V106 | A118 | — | — | — | — | F125 | — | — | — | N130 | L137 | — | V140 | — |
| 180 | F103 | V104 | A116 | — | — | — | — | F123 | — | — | — | N128 | L135 | — | I138 | — |
| 181 | F105 | V106 | A118 | — | — | — | — | F125 | — | — | — | N130 | L137 | — | V140 | — |
| 182 | F105 | V106 | A118 | — | — | — | — | F125 | — | — | — | N130 | L137 | — | V140 | — |
| 183 | L105 | F106 | A118 | — | — | — | — | F125 | — | — | — | N130 | L137 | — | V140 | — |
| 184 | L141 | I142 | G148 | T150 | K154 | A165 | F167 | — | — | — | — | — | — | — | — | K181 |
| 185 | L141 | I142 | G148 | T150 | K154 | A165 | F167 | — | — | — | — | — | — | — | — | K181 |
| 186 | L141 | I142 | G148 | T150 | K154 | A165 | F167 | — | — | — | — | — | — | — | — | K181 |
| 187 | L141 | I142 | G148 | T150 | K154 | A165 | F167 | — | — | — | — | — | — | — | — | K181 |
| 188 | L141 | I142 | G148 | T150 | K154 | A165 | F167 | — | — | — | — | — | — | — | — | K181 |
| 189 | L141 | I142 | G148 | T150 | K154 | A164 | F166 | — | — | — | — | — | — | — | — | K180 |
| 190 | L141 | I142 | G148 | T150 | K154 | A165 | F167 | — | — | — | — | — | — | — | — | K181 |
| 191 | L141 | I142 | G148 | T150 | K154 | A165 | F167 | — | — | — | — | — | — | — | — | K181 |
| 192 | L141 | I142 | G148 | T150 | K154 | A165 | F167 | — | — | — | — | — | — | — | — | K181 |
| 193 | L141 | I142 | G148 | T150 | K154 | E165 | F167 | — | — | — | — | — | — | — | — | K181 |
| 194 | L141 | I142 | G148 | T150 | K154 | A165 | F167 | — | — | — | — | — | — | — | — | K181 |
| 195 | L141 | I142 | G148 | T150 | K154 | A165 | F167 | — | — | — | — | — | — | — | — | K181 |
| 196 | L141 | I142 | G148 | T150 | K154 | A165 | F167 | — | — | — | — | — | — | — | — | K181 |
| 197 | L141 | I142 | G148 | T150 | K154 | A165 | F167 | — | — | — | — | — | — | — | — | K181 |
| 198 | L141 | I142 | G148 | T150 | K154 | A165 | F167 | — | — | — | — | — | — | — | — | K181 |
| 199 | L141 | I142 | G148 | T150 | K154 | A165 | F167 | — | — | — | — | — | — | — | — | K181 |
| 200 | L141 | I142 | G148 | T150 | K154 | A165 | F167 | — | — | — | — | — | — | — | — | K181 |
| 201 | L121 | I122 | G128 | T130 | K134 | A145 | F147 | — | — | — | — | — | — | — | — | K161 |
| 202 | L141 | I142 | G148 | T150 | K154 | A165 | F167 | — | — | — | — | — | — | — | — | K181 |
| 203 | L141 | I142 | G148 | T150 | K154 | A165 | F167 | — | — | — | — | — | — | — | — | K181 |
| 204 | L141 | I142 | G148 | T150 | K154 | A165 | F167 | — | — | — | — | — | — | — | — | K181 |
| 205 | L141 | I142 | G148 | T150 | K154 | A165 | F167 | — | — | — | — | — | — | — | — | K181 |
| 206 | L141 | I142 | G148 | T150 | K154 | A165 | F167 | — | — | — | — | — | — | — | — | K181 |
| 207 | L141 | I142 | G148 | T150 | K154 | A165 | F167 | — | — | — | — | — | — | — | — | K181 |
| 208 | L141 | I142 | G148 | T150 | K154 | A165 | F167 | — | — | — | — | — | — | — | — | K181 |
| 209 | L141 | I142 | G148 | T150 | K154 | A165 | F167 | — | — | — | — | — | — | — | — | K181 |
| 210 | L141 | I142 | G148 | T150 | K154 | A165 | F167 | — | — | — | — | — | — | — | — | K181 |
| 211 | L141 | I142 | G148 | T150 | K154 | A165 | F167 | — | — | — | — | — | — | — | — | K181 |
| 212 | L141 | I142 | G148 | T150 | K154 | A165 | F167 | — | — | — | — | — | — | — | — | K181 |
| 213 | L141 | I142 | G148 | T150 | K154 | A165 | F167 | — | — | — | — | — | — | — | — | K181 |
| 214 | L141 | I142 | G148 | T150 | K154 | A165 | F167 | — | — | — | — | — | — | — | — | K181 |
| 215 | L141 | I142 | G148 | T150 | K154 | A165 | F167 | — | — | — | — | — | — | — | — | K181 |
| 216 | L141 | I142 | G148 | T150 | K154 | A165 | F167 | — | — | — | — | — | — | — | — | K181 |
| 217 | L141 | I142 | G148 | T150 | K154 | A165 | F167 | — | — | — | — | — | — | — | — | K181 |
| 218 | F141 | I142 | G148 | T150 | K154 | A165 | F167 | — | — | — | — | — | — | — | — | K181 |
| 219 | L141 | I142 | G148 | T150 | K154 | A165 | F167 | — | — | — | — | — | — | — | — | K181 |
| 220 | L141 | I142 | G148 | T150 | K154 | T165 | F167 | — | — | — | — | — | — | — | — | K181 |
| 221 | L141 | I142 | G148 | T150 | K154 | A165 | F167 | — | — | — | — | — | — | — | — | K181 |
| 222 | L141 | I142 | G148 | T150 | K154 | A165 | F167 | — | — | — | — | — | — | — | — | K181 |
| 223 | L141 | I142 | G148 | T150 | K154 | T165 | F167 | — | — | — | — | — | — | — | — | K181 |
| 224 | L141 | I142 | G148 | T150 | K154 | A165 | F167 | — | — | — | — | — | — | — | — | K181 |
| 225 | L141 | I142 | G148 | T150 | K154 | A165 | F167 | — | — | — | — | — | — | — | — | K181 |
| 226 | L141 | I142 | G148 | T150 | K154 | A165 | F167 | — | — | — | — | — | — | — | — | K181 |
| 227 | L141 | I142 | G148 | T150 | K154 | T165 | F167 | — | — | — | — | — | — | — | — | K181 |
| 228 | L141 | I142 | G148 | T150 | K154 | A165 | F167 | — | — | — | — | — | — | — | — | K181 |
| 229 | L141 | I142 | G148 | T150 | K154 | A165 | F167 | — | — | — | — | — | — | — | — | K181 |
| 230 | L141 | I142 | G148 | T150 | K154 | A165 | F167 | — | — | — | — | — | — | — | — | — |
| 231 | L141 | I142 | G148 | T150 | K154 | T165 | F167 | — | — | — | — | — | — | — | — | K181 |
| 232 | L141 | I142 | G148 | T150 | K154 | A165 | F167 | — | — | — | — | — | — | — | — | K181 |
| 233 | L141 | I142 | G148 | T150 | K154 | A165 | F167 | — | — | — | — | — | — | — | — | K181 |
| 234 | L141 | I142 | G148 | T150 | K154 | A165 | F167 | — | — | — | — | — | — | — | — | K181 |
| 235 | L141 | I142 | G148 | T150 | K154 | A165 | F167 | — | — | — | — | — | — | — | — | K181 |
| 236 | L141 | I142 | G148 | T150 | K154 | A165 | F167 | — | — | — | — | — | — | — | — | K181 |
| 237 | L141 | I142 | G148 | T150 | K154 | A165 | F167 | — | — | — | — | — | — | — | — | K181 |
| 238 | L141 | I142 | G148 | T150 | K154 | T165 | F167 | — | — | — | — | — | — | — | — | — |
| 239 | L141 | I142 | G148 | T150 | K154 | A165 | F167 | — | — | — | — | — | — | — | — | K181 |
| 240 | L141 | I142 | G148 | T150 | K154 | A165 | F167 | — | — | — | — | — | — | — | — | K181 |
| 241 | L141 | I142 | G148 | T150 | K154 | A165 | F167 | — | — | — | — | — | — | — | — | K181 |
| 242 | L141 | I142 | G148 | T150 | K154 | A165 | F167 | — | — | — | — | — | — | — | — | K181 |
| 243 | L141 | I142 | G148 | T150 | K154 | A165 | F167 | — | — | — | — | — | — | — | — | K181 |
| 244 | L141 | I142 | G148 | T150 | K154 | A165 | F167 | — | — | — | — | — | — | — | — | K181 |
| 245 | L141 | I142 | G148 | T150 | K154 | A165 | F167 | — | — | — | — | — | — | — | — | K181 |
| 246 | L141 | I142 | G148 | T150 | K154 | A165 | F167 | — | — | — | — | — | — | — | — | K181 |
| 247 | L141 | I142 | G148 | T150 | K154 | A165 | F167 | — | — | — | — | — | — | — | — | K181 |
| 248 | L141 | I142 | G148 | T150 | K154 | A165 | F167 | — | — | — | — | — | — | — | — | K181 |
| 249 | L147 | I148 | G154 | T156 | K160 | T171 | F173 | — | — | — | — | — | — | — | — | K187 |
| 250 | L141 | I142 | G148 | T150 | K154 | A165 | F167 | — | — | — | — | — | — | — | — | K181 |
| 251 | L131 | I132 | G138 | T140 | K144 | A155 | F157 | — | — | — | — | — | — | — | — | K171 |
| 252 | L141 | I142 | G148 | T150 | K154 | A165 | F167 | — | — | — | — | — | — | — | — | K181 |
| 253 | L141 | I142 | G148 | T150 | K154 | A165 | F167 | — | — | — | — | — | — | — | — | K181 |
| 254 | L141 | I142 | G148 | T150 | K154 | A165 | F167 | — | — | — | — | — | — | — | — | K181 |
| 255 | L141 | I142 | G148 | T150 | K154 | A165 | F167 | — | — | — | — | — | — | — | — | K181 |
| 256 | L141 | I142 | G148 | T150 | K154 | A165 | F167 | — | — | — | — | — | — | — | — | K181 |
| 257 | L141 | I142 | G148 | T150 | K154 | A165 | F167 | — | — | — | — | — | — | — | — | K181 |
| 258 | L141 | I142 | G148 | T150 | K154 | A165 | F167 | — | — | — | — | — | — | — | — | K181 |
| 259 | L141 | I142 | G148 | T150 | K154 | A165 | F167 | — | — | — | — | — | — | — | — | K181 |
| 260 | L141 | I142 | G148 | T150 | K154 | A165 | F167 | — | — | — | — | — | — | — | — | K181 |
| 261 | L141 | I142 | G148 | T150 | K154 | A165 | F167 | — | — | — | — | — | — | — | — | K181 |
| 262 | L141 | I142 | G148 | T150 | K154 | A164 | F166 | — | — | — | — | — | — | — | — | K180 |
| 263 | L141 | I142 | G148 | T150 | K154 | A165 | F167 | — | — | — | — | — | — | — | — | K181 |
| 264 | L141 | I142 | G148 | T150 | K154 | S165 | F167 | — | — | — | — | — | — | — | — | I181 |
| 265 | L141 | I142 | G148 | T150 | K154 | A165 | F167 | — | — | — | — | — | — | — | — | K181 |
| 266 | L141 | I142 | G148 | T150 | K154 | A165 | F167 | — | — | — | — | — | — | — | — | K181 |
| 267 | L141 | I142 | G148 | T150 | K154 | S165 | F167 | — | — | — | — | — | — | — | — | I181 |
| 268 | L141 | I142 | G148 | T150 | K154 | A165 | F167 | — | — | — | — | — | — | — | — | K181 |
| 269 | L141 | I142 | G148 | T150 | K154 | A165 | F167 | — | — | — | — | — | — | — | — | K181 |
| 270 | L141 | I142 | G148 | T150 | K154 | A165 | F167 | — | — | — | — | — | — | — | — | K181 |
| 271 | L141 | I142 | G148 | T150 | K154 | A165 | F167 | — | — | — | — | — | — | — | — | K181 |
| 272 | L141 | I142 | G148 | T150 | K154 | A165 | F167 | — | — | — | — | — | — | — | — | K181 |
| 273 | L141 | I142 | G148 | T150 | K154 | A165 | F167 | — | — | — | — | — | — | — | — | K181 |
| 274 | L141 | I142 | G148 | T150 | K154 | A165 | F167 | — | — | — | — | — | — | — | — | K181 |
| 275 | L255 | Q256 | M268 | — | — | — | — | — | W274 | P280 | — | — | — | — | A288 | — |
| 276 | L255 | Q256 | M268 | — | — | — | — | — | W274 | P280 | — | — | — | — | A288 | — |
| 277 | L255 | Q256 | M268 | — | — | — | — | — | W274 | P280 | — | — | — | — | A288 | — |
| 278 | L255 | Q256 | M268 | — | — | — | — | — | W274 | P280 | — | — | — | — | A288 | — |
| 279 | L255 | Q256 | M268 | — | — | — | — | — | W274 | P280 | — | — | — | — | A288 | — |
| 280 | L255 | Q256 | M268 | — | — | — | — | — | W274 | P280 | — | — | — | — | A288 | S300 |
| 281 | L255 | Q256 | M268 | — | — | — | — | — | W274 | P280 | — | — | — | — | A288 | — |
| 282 | L255 | Q256 | M268 | — | — | — | — | — | W274 | P280 | — | — | — | — | A288 | — |
| 283 | L255 | Q256 | M268 | — | — | — | — | — | W274 | P280 | — | — | — | — | A288 | — |
| 284 | L255 | Q256 | M268 | — | — | — | — | — | W274 | P280 | — | — | — | — | A288 | — |
| 285 | L255 | Q256 | M268 | — | — | — | — | — | W274 | P280 | — | — | — | — | A288 | — |
| 286 | L255 | Q256 | M268 | — | — | — | — | — | W274 | P280 | — | — | — | — | A288 | — |
| 287 | L255 | Q256 | M268 | — | — | — | — | — | W274 | P280 | — | — | — | — | A288 | L300 |
| 288 | L255 | Q256 | M268 | — | — | — | — | — | W274 | P280 | — | — | — | — | A288 | — |
| 289 | L255 | Q256 | M268 | — | — | — | — | — | W274 | P280 | — | — | — | — | A288 | — |
| 290 | L255 | Q256 | M268 | — | — | — | — | — | W274 | P280 | — | — | — | — | A288 | — |
| 291 | L255 | Q256 | M268 | — | — | — | — | — | W274 | P280 | — | — | — | — | A288 | — |
| 292 | L258 | Q259 | M271 | — | — | — | — | — | W277 | P283 | — | — | — | — | A291 | A304 |
| 293 | L256 | Q257 | M269 | — | — | — | — | — | W275 | P281 | — | — | — | — | K289 | E302 |
| 294 | L258 | Q259 | M271 | — | — | — | — | — | W277 | P283 | — | — | — | — | R291 | — |
| 295 | L257 | Q258 | M270 | — | — | — | — | — | W276 | P282 | — | — | — | — | L290 | — |
| 296 | L257 | Q258 | M270 | — | — | — | — | — | W276 | P282 | — | — | — | — | R290 | — |
| 297 | L257 | Q258 | M270 | — | — | — | — | — | W276 | P282 | — | — | — | — | R290 | — |
| 298 | L257 | Q258 | M270 | — | — | — | — | — | W276 | P282 | — | — | — | — | L290 | — |
| 299 | L262 | Q263 | M275 | — | — | — | — | — | W281 | P287 | — | — | — | — | K295 | A307 |
| 300 | L261 | Q262 | M274 | — | — | — | — | — | W280 | P286 | — | — | — | — | K294 | — |
| 301 | L257 | Q258 | L270 | — | — | — | — | — | W276 | P282 | — | — | — | — | R290 | A303 |

[0360] Assays to test for the functionality of such mutants are readily available in the art, and respectively, described in the Example section of the present invention.

[0361] In a preferred embodiment, the mutated PPO refers to a polypeptide of SEQ ID NO: 1, 2, 3, 4, 5, 6, 7, 8, 9, 10, 11, 12, 13, 14, 15, 16, 17, 18, 19, 20, 21, 22, 23, 24, 25, 26, 27, 28, 29, 30, 31, 32, 33, 34, 35, 36, 37, 38, 39, 40, 41, 42, 43, 44, 45, 46, 47, 48, 49, 50, 51, 52, 53, 54, 55, 56, 57, 58, 59, 60, 61, 62, 63, 64, 65, 66, 67, 68, 69, 70, 71, 72, 73, 74, 75, 76, 77, 78, 79, 80, 81, 82, 83, 84, 85, 86, 87, 88, 89, 90, 91, 92, 93, 94, 95, 96, 97, 98, 99, 100, 101, 102, 103, 104, 105, 106, 107, 108, 109, 110, 111, 112, 113, 114, 115, 116, 117, 118, 119, 120, 121, 122, 123, 124, 125, 126, 127, 128, 129, 130, 131, 132, 133, 134, 135, 136, 137, 138, 139, 140, 141, 142, 143, 144, 145, 146, 147, 148, 149, 150, 151, 152, 153, 154, 155, 156, 157, 158, 159, 160, 161, 162, 163, 164, 165, 166, 167, 168, 169, 170, 171, 172, 173, 174, 175, 176, 177, 178, 179, 180, 181, 182, 183, 184, 185, 186, 187, 188, 189, 190, 191, 192, 193, 194, 195, 196, 197, 198, 199, 200, 201, 202, 203, 204, 205, 206, 207, 208, 209, 210, 211, 212, 213, 214, 215, 216, 217, 218, 219, 220, 221, 222, 223, 224, 225, 226, 227, 228, 229, 230, 231, 232, 233, 234, 235, 236, 237, 238, 239, 240, 241, 242, 243, 244, 245, 246, 247, 248, 249, 250, 251, 252, 253, 254, 255, 256, 257, 258, 259, 260, 261, 262, 263, 264, 265, 266, 267, 268, 269, 270, 271, 272, 273, 274, 275, 276, 277, 278, 279, 280, 281, 282, 283, 284, 285, 286, 287, 288, 289, 290, 291, 292, 293, 294, 295, 296, 297, 298, 299, 300, 301, 312, or 313, in which the amino acid sequence differs at Mutated site 1 (which corresponds to Arg128 of SEQ ID NO: 1) according to Table 2a, and/or at Mutated site 5 (which corresponds to Phe420 of SEQ ID NO: 1) according to Table 2a.

[0362] Examples of differences at these amino acid positions include, but are not limited to, one or more of the following:

[0363] the amino acid at Mutated site 1 is other than Arginine (or Tryosine, or Cysteine; as the case may be according to Table 2a);

[0364] the amino acid at Mutated site 5 is other than Phenylalanine (or Methionine, or Tyrosine, or Leucine, as the case may be according to Table 2a),

[0365] In particularly preferred embodiment, the mutated PPO comprises a sequence of SEQ ID NO: 1, 2, 3, 4, 5, 6, 7, 8, 9, 10, 11, 12, 13, 14, 15, 16, 17, 18, 19, 20, 21, 22, 23, 24, 25, 26, 27, 28, 29, 30, 31, 32, 33, 34, 35, 36, 37, 38, 39, 40, 41, 42, 43, 44, 45, 46, 47, 48, 49, 50, 51, 52, 53, 54, 55, 56, 57, 58, 59, 60, 61, 62, 63, 64, 65, 66, 67, 68, 69, 70, 71, 72, 73, 74, 75, 76, 77, 78, 79, 80, 81, 82, 83, 84, 85, 86, 87, 88, 89, 90, 91, 92, 93, 94, 95, 96, 97, 98, 99, 100, 101, 102, 103, 104, 105, 106, 107, 108, 109, 110, 111, 112, 113, 114, 115, 116, 117, 118, 119, 120, 121, 122, 123, 124, 125, 126, 127, 128, 129, 130, 131, 132, 133, 134, 135, 136, 137, 138, 139, 140, 141, 142, 143, 144, 145, 146, 147, 148, 149, 150, 151, 152, 153, 154, 155, 156, 157, 158, 159, 160, 161, 162, 163, 164, 165, 166, 167, 168, 169, 170, 171, 172, 173, 174, 175, 176, 177, 178, 179, 180, 181, 182, 183, 184, 185, 186, 187, 188, 189, 190, 191, 192, 193, 194, 195, 196, 197, 198, 199, 200, 201, 202, 203, 204, 205, 206, 207, 208, 209, 210, 211, 212, 213, 214, 215, 216, 217, 218, 219, 220, 221, 222, 223, 224, 225, 226, 227, 228, 229, 230, 231, 232, 233, 234, 235, 236, 237, 238, 239, 240, 241, 242, 243, 244, 245, 246, 247, 248, 249, 250, 251, 252, 253, 254, 255, 256, 257, 258, 259, 260, 261, 262, 263, 264, 265, 266, 267, 268, 269, 270, 271, 272, 273, 274, 275, 276, 277, 278, 279, 280, 281, 282, 283, 284, 285, 286, 287, 288, 289, 290, 291, 292, 293, 294, 295, 296, 297, 298, 299, 300, 301, 312, or 313, a variant, derivative, orthologue, paralogue or homologue thereof, in which: the amino acid at Mutated site 1 (which corresponds to Arg128 of SEQ ID NO: 1) is Leu, Ala, Val, Ile, Met, Tyr, Gly, Asn, Cys, Phe, Ser, Thr, Gln, or His, and the amino acid at Mutated site 5 (which corresponds to Phe420 of SEQ ID NO: 1) is Ala, Leu, Val, Ile, or Met.

[0366] In another preferred embodiment, the mutated PPO comprises a sequence of SEQ ID NO: 1, 2, 3, 4, 5, 6, 7, 8, 9, 10, 11, 12, 13, 14, 15, 16, 17, 18, 19, 20, 21, 22, 23, 24, 25, 26, 27, 28, 29, 30, 31, 32, 33, 34, 35, 36, 37, 38, 39, 40, 41, 42, 43, 44, 45, 46, 47, 48, 49, 50, 51, 52, 53, 54, 55, 56, 57, 58, 59, 60, 61, 62, 63, 64, 65, 66, 67, 68, 69, 70, 71, 72, 73, 74, 75, 76, 77, 78, 79, 80, 81, 82, 83, 84, 85, 86, 87, 88, 89, 90, 91, 92, 93, 94, 95, 96, 97, 98, 99, 100, 101, 102, 103, 104, 105, 106, 107, 108, 109, 110, 111, 112, 113, 114, 115, 116, 117, 118, 119, 120, 121, 122, 123, 124, 125, 126, 127, 128, 129, 130, 131, 132, 133, 134, 135, 136, 137, 138, 139, 140, 141, 142, 143, 144, 145, 146, 147, 148, 149, 150, 151, 152, 153, 154, 155, 156, 157, 158, 159, 160, 161, 162, 163, 164, 165, 166, 167, 168, 169, 170, 171, 172, 173, 174, 175, 176, 177, 178, 179, 180, 181, 182, 183, 184, 185, 186, 187, 188, 189, 190, 191, 192, 193, 194, 195, 196, 197, 198, 199, 200, 201, 202, 203, 204, 205, 206, 207, 208, 209, 210, 211, 212, 213, 214, 215, 216, 217, 218, 219, 220, 221, 222, 223, 224, 225, 226, 227, 228, 229, 230, 231, 232, 233, 234, 235, 236, 237, 238, 239, 240, 241, 242, 243, 244, 245, 246, 247, 248, 249, 250, 251, 252, 253, 254, 255, 256, 257, 258, 259, 260, 261, 262, 263, 264, 265, 266, 267, 268, 269, 270, 271, 272, 273, 274, 275, 276, 277, 278, 279, 280, 281, 282, 283, 284, 285, 286, 287, 288, 289, 290, 291, 292, 293, 294, 295, 296, 297, 298, 299, 300, 301, 312, or 313, a variant, derivative, orthologue, paralogue or homologue thereof, in which: the amino acid at Mutated site 1 is Leu, and the amino acid at Mutated site 5 is Ala.

[0367] In another preferred embodiment, the mutated PPO comprises a sequence of SEQ ID NO: 1, 2, 3, 4, 5, 6, 7, 8, 9, 10, 11, 12, 13, 14, 15, 16, 17, 18, 19, 20, 21, 22, 23, 24, 25, 26, 27, 28, 29, 30, 31, 32, 33, 34, 35, 36, 37, 38, 39, 40, 41, 42, 43, 44, 45, 46, 47, 48, 49, 50, 51, 52, 53, 54, 55, 56, 57, 58, 59, 60, 61, 62, 63, 64, 65, 66, 67, 68, 69, 70, 71, 72, 73, 74, 75, 76, 77, 78, 79, 80, 81, 82, 83, 84, 85, 86, 87, 88, 89, 90, 91, 92, 93, 94, 95, 96, 97, 98, 99, 100, 101, 102, 103, 104, 105, 106, 107, 108, 109, 110, 111, 112, 113, 114, 115, 116, 117, 118, 119, 120, 121, 122, 123, 124, 125, 126, 127, 128, 129, 130, 131, 132, 133, 134, 135, 136, 137, 138, 139, 140, 141, 142, 143, 144, 145, 146, 147, 148, 149, 150, 151, 152, 153, 154, 155, 156, 157, 158, 159, 160, 161, 162, 163, 164, 165, 166, 167, 168, 169, 170, 171, 172, 173, 174, 175, 176, 177, 178, 179, 180, 181, 182, 183, 184, 185, 186, 187, 188, 189, 190, 191, 192, 193, 194, 195, 196, 197, 198, 199, 200, 201, 202, 203, 204, 205, 206, 207, 208, 209, 210, 211, 212, 213, 214, 215, 216, 217, 218, 219, 220, 221, 222, 223, 224, 225, 226, 227, 228, 229, 230, 231, 232, 233, 234, 235, 236, 237, 238, 239, 240, 241, 242, 243, 244, 245, 246, 247, 248, 249, 250, 251, 252, 253, 254, 255, 256, 257, 258, 259, 260, 261, 262, 263, 264, 265, 266, 267, 268, 269, 270, 271, 272, 273, 274, 275, 276, 277, 278, 279, 280, 281, 282, 283, 284, 285, 286, 287, 288, 289, 290, 291, 292, 293, 294, 295, 296, 297, 298, 299, 300, 301, 312, or 313, a variant, derivative, orthologue, paralogue or homologue thereof, in which:

[0368] the amino acid at Mutated site 1 is Leu, and the amino acid at Mutated site 5 is Leu.

[0369] In another preferred embodiment, the mutated PPO comprises a sequence of SEQ ID NO: 1, 2, 3, 4, 5, 6, 7, 8, 9, 10, 11, 12, 13, 14, 15, 16, 17, 18, 19, 20, 21, 22, 23, 24, 25, 26, 27, 28, 29, 30, 31, 32, 33, 34, 35, 36, 37, 38, 39, 40, 41, 42, 43, 44, 45, 46, 47, 48, 49, 50, 51, 52, 53, 54, 55, 56, 57, 58, 59, 60, 61, 62, 63, 64, 65, 66, 67, 68, 69, 70, 71, 72, 73, 74, 75, 76, 77, 78, 79, 80, 81, 82, 83, 84, 85, 86, 87, 88, 89, 90, 91, 92, 93, 94, 95, 96, 97, 98, 99, 100, 101, 102, 103, 104, 105, 106, 107, 108, 109, 110, 111, 112, 113, 114, 115, 116, 117, 118, 119, 120, 121, 122, 123, 124, 125, 126, 127, 128, 129, 130, 131, 132, 133, 134, 135, 136, 137, 138, 139, 140, 141, 142, 143, 144, 145, 146, 147, 148, 149, 150, 151, 152, 153, 154, 155, 156, 157, 158, 159, 160, 161, 162, 163, 164, 165, 166, 167, 168, 169, 170, 171, 172, 173, 174, 175, 176, 177, 178, 179, 180, 181, 182, 183, 184, 185, 186, 187, 188, 189, 190, 191, 192, 193, 194, 195, 196, 197, 198, 199, 200, 201, 202, 203, 204, 205, 206, 207, 208, 209, 210, 211, 212, 213, 214, 215, 216, 217, 218, 219, 220, 221, 222, 223, 224, 225, 226, 227, 228, 229, 230, 231, 232, 233, 234, 235, 236, 237, 238, 239, 240, 241, 242, 243, 244, 245, 246, 247, 248, 249, 250, 251, 252, 253, 254, 255, 256, 257, 258, 259, 260, 261, 262, 263, 264, 265, 266, 267, 268, 269, 270, 271, 272, 273, 274, 275, 276, 277, 278, 279, 280, 281, 282, 283, 284, 285, 286, 287, 288, 289, 290, 291, 292, 293, 294, 295, 296, 297, 298, 299, 300, 301, 312, or 313, a variant, derivative, orthologue, paralogue or homologue thereof, in which:

[0370] the amino acid at Mutated site 1 is Leu, and the amino acid at Mutated site 5 is Val.

[0371] In another preferred embodiment, the mutated PPO comprises a sequence of SEQ ID NO: 1, 2, 3, 4, 5, 6, 7, 8, 9, 10, 11, 12, 13, 14, 15, 16, 17, 18, 19, 20, 21, 22, 23, 24, 25, 26, 27, 28, 29, 30, 31, 32, 33, 34, 35, 36, 37, 38, 39, 40, 41, 42, 43, 44, 45, 46, 47, 48, 49, 50, 51, 52, 53, 54, 55, 56, 57, 58, 59, 60, 61, 62, 63, 64, 65, 66, 67, 68, 69, 70, 71, 72, 73, 74, 75, 76, 77, 78, 79, 80, 81, 82, 83, 84, 85, 86, 87, 88, 89, 90, 91, 92, 93, 94, 95, 96, 97, 98, 99, 100, 101, 102, 103, 104, 105, 106, 107, 108, 109, 110, 111, 112, 113, 114, 115, 116, 117, 118, 119, 120, 121, 122, 123, 124, 125, 126, 127, 128, 129, 130, 131, 132, 133, 134, 135, 136, 137, 138, 139, 140, 141, 142, 143, 144, 145, 146, 147, 148, 149, 150, 151, 152, 153, 154, 155, 156, 157, 158, 159, 160, 161, 162, 163, 164, 165, 166, 167, 168, 169, 170, 171, 172, 173, 174, 175, 176, 177, 178, 179, 180, 181, 182, 183, 184, 185, 186, 187, 188, 189, 190, 191, 192, 193, 194, 195, 196, 197, 198, 199, 200, 201, 202, 203, 204, 205, 206, 207, 208, 209, 210, 211, 212, 213, 214, 215, 216, 217, 218, 219, 220, 221, 222, 223, 224, 225, 226, 227, 228, 229, 230, 231, 232, 233, 234, 235, 236, 237, 238, 239, 240, 241, 242, 243, 244, 245, 246, 247, 248, 249, 250, 251, 252, 253, 254, 255, 256, 257, 258, 259, 260, 261, 262, 263, 264, 265, 266, 267, 268, 269, 270, 271, 272, 273, 274, 275, 276, 277, 278, 279, 280, 281, 282, 283, 284, 285, 286, 287, 288, 289, 290, 291, 292, 293, 294, 295, 296, 297, 298, 299, 300, 301, 312, or 313, a variant, derivative, orthologue, paralogue or homologue thereof, in which:

[0372] the amino acid at Mutated site 1 is Leu, and the amino acid at Mutated site 5 is Ile.

[0373] In another preferred embodiment, the mutated PPO comprises a sequence of SEQ ID NO: 1, 2, 3, 4, 5, 6, 7, 8, 9, 10, 11, 12, 13, 14, 15, 16, 17, 18, 19, 20, 21, 22, 23, 24, 25, 26, 27, 28, 29, 30, 31, 32, 33, 34, 35, 36, 37, 38, 39, 40, 41, 42, 43, 44, 45, 46, 47, 48, 49, 50, 51, 52, 53, 54, 55, 56, 57, 58, 59, 60, 61, 62, 63, 64, 65, 66, 67, 68, 69, 70, 71, 72, 73, 74, 75, 76, 77, 78, 79, 80, 81, 82, 83, 84, 85, 86, 87, 88, 89, 90, 91, 92, 93, 94, 95, 96, 97, 98, 99, 100, 101, 102, 103, 104, 105, 106, 107, 108, 109, 110, 111, 112, 113, 114, 115, 116, 117, 118, 119, 120, 121, 122, 123, 124, 125, 126, 127, 128, 129, 130, 131, 132, 133, 134, 135, 136, 137, 138, 139, 140, 141, 142, 143, 144, 145, 146, 147, 148, 149, 150, 151, 152, 153, 154, 155, 156, 157, 158, 159, 160, 161, 162, 163, 164, 165, 166, 167, 168, 169, 170, 171, 172, 173, 174, 175, 176, 177, 178, 179, 180, 181, 182, 183, 184, 185, 186, 187, 188, 189, 190, 191, 192, 193, 194, 195, 196, 197, 198, 199, 200, 201, 202, 203, 204, 205, 206, 207, 208, 209, 210, 211, 212, 213, 214, 215, 216, 217, 218, 219, 220, 221, 222, 223, 224, 225, 226, 227, 228, 229, 230, 231, 232, 233, 234, 235, 236, 237, 238, 239, 240, 241, 242, 243, 244, 245, 246, 247, 248, 249, 250, 251, 252, 253, 254, 255, 256, 257, 258, 259, 260, 261, 262, 263, 264, 265, 266, 267, 268, 269, 270, 271, 272, 273, 274, 275, 276, 277, 278, 279, 280, 281, 282, 283, 284, 285, 286, 287, 288, 289, 290, 291, 292, 293, 294, 295, 296, 297, 298, 299, 300, 301, 312, or 313, a variant, derivative, orthologue, paralogue or homologue thereof, in which:

[0374] the amino acid at Mutated site 1 is Leu, and the amino acid at Mutated site 5 is Met.

[0375] In another preferred embodiment, the mutated PPO comprises a sequence of SEQ ID NO: 1, 2, 3, 4, 5, 6, 7, 8, 9, 10, 11, 12, 13, 14, 15, 16, 17, 18, 19, 20, 21, 22, 23, 24, 25, 26, 27, 28, 29, 30, 31, 32, 33, 34, 35, 36, 37, 38, 39, 40, 41, 42, 43, 44, 45, 46, 47, 48, 49, 50, 51, 52, 53, 54, 55, 56, 57, 58, 59, 60, 61, 62, 63, 64, 65, 66, 67, 68, 69, 70, 71, 72, 73, 74, 75, 76, 77, 78, 79, 80, 81, 82, 83, 84, 85, 86, 87, 88, 89, 90, 91, 92, 93, 94, 95, 96, 97, 98, 99, 100, 101, 102, 103, 104, 105, 106, 107, 108, 109, 110, 111, 112, 113, 114, 115, 116, 117, 118, 119, 120, 121, 122, 123, 124, 125, 126, 127, 128, 129, 130, 131, 132, 133, 134, 135, 136, 137, 138, 139, 140, 141, 142, 143, 144, 145, 146, 147, 148, 149, 150, 151, 152, 153, 154, 155, 156, 157, 158, 159, 160, 161, 162, 163, 164, 165, 166, 167, 168, 169, 170, 171, 172, 173, 174, 175, 176, 177, 178, 179, 180, 181, 182, 183, 184, 185, 186, 187, 188, 189, 190, 191, 192, 193, 194, 195, 196, 197, 198, 199, 200, 201, 202, 203, 204, 205, 206, 207, 208, 209, 210, 211, 212, 213, 214, 215, 216, 217, 218, 219, 220, 221, 222, 223, 224, 225, 226, 227, 228, 229, 230, 231, 232, 233, 234, 235, 236, 237, 238, 239, 240, 241, 242, 243, 244, 245, 246, 247, 248, 249, 250, 251, 252, 253, 254, 255, 256, 257, 258, 259, 260, 261, 262, 263, 264, 265, 266, 267, 268, 269, 270, 271, 272, 273, 274, 275, 276, 277, 278, 279, 280, 281, 282, 283, 284, 285, 286, 287, 288, 289, 290, 291, 292, 293, 294, 295, 296, 297, 298, 299, 300, 301, 312, or 313, a variant, derivative, orthologue, paralogue or homologue thereof, in which:

[0376] the amino acid at Mutated site 1 is Ala, and the amino acid at Mutated site 5 is Ala.

[0377] In another preferred embodiment, the mutated PPO comprises a sequence of SEQ ID NO: 1, 2, 3, 4, 5, 6, 7, 8, 9, 10, 11, 12, 13, 14, 15, 16, 17, 18, 19, 20, 21, 22, 23, 24, 25, 26, 27, 28, 29, 30, 31, 32, 33, 34, 35, 36, 37, 38, 39, 40, 41, 42, 43, 44, 45, 46, 47, 48, 49, 50, 51, 52, 53, 54, 55, 56, 57, 58, 59, 60, 61, 62, 63, 64, 65, 66, 67, 68, 69, 70, 71, 72, 73, 74, 75, 76, 77, 78, 79, 80, 81, 82, 83, 84, 85, 86, 87, 88, 89, 90, 91, 92, 93, 94, 95, 96, 97, 98, 99, 100, 101, 102, 103, 104, 105, 106, 107, 108, 109, 110, 111, 112, 113, 114, 115, 116, 117, 118, 119, 120, 121, 122, 123, 124, 125, 126, 127, 128, 129, 130, 131, 132, 133, 134, 135, 136, 137, 138, 139, 140, 141, 142, 143, 144, 145, 146, 147, 148, 149, 150, 151, 152, 153, 154, 155, 156, 157, 158, 159, 160, 161, 162, 163, 164, 165, 166, 167, 168, 169, 170, 171, 172, 173, 174, 175, 176, 177, 178, 179, 180, 181, 182, 183, 184, 185, 186, 187, 188, 189, 190, 191, 192, 193, 194, 195, 196, 197, 198, 199, 200, 201, 202, 203, 204, 205, 206, 207, 208, 209, 210, 211, 212, 213, 214, 215, 216, 217, 218, 219, 220, 221, 222, 223, 224, 225, 226, 227, 228, 229, 230, 231, 232, 233, 234, 235, 236, 237, 238, 239, 240, 241, 242, 243, 244, 245, 246, 247, 248, 249, 250, 251, 252, 253, 254, 255, 256, 257, 258, 259, 260, 261, 262, 263, 264, 265, 266, 267, 268, 269, 270, 271, 272, 273, 274, 275, 276, 277, 278, 279, 280, 281, 282, 283, 284, 285, 286, 287, 288, 289, 290, 291, 292, 293, 294, 295, 296, 297, 298, 299, 300, 301, 312, or 313, a variant, derivative, orthologue, paralogue or homologue thereof, in which:

[0378] the amino acid at Mutated site 1 is Ala, and the amino acid at Mutated site 5 is Leu.

[0379] In another preferred embodiment, the mutated PPO comprises a sequence of SEQ ID NO: 1, 2, 3, 4, 5, 6, 7, 8, 9, 10, 11, 12, 13, 14, 15, 16, 17, 18, 19, 20, 21, 22, 23, 24, 25, 26, 27, 28, 29, 30, 31, 32, 33, 34, 35, 36, 37, 38, 39, 40, 41, 42, 43, 44, 45, 46, 47, 48, 49, 50, 51, 52, 53, 54, 55, 56, 57, 58, 59, 60, 61, 62, 63, 64, 65, 66, 67, 68, 69, 70, 71, 72, 73, 74, 75, 76, 77, 78, 79, 80, 81, 82, 83, 84, 85, 86, 87, 88, 89, 90, 91, 92, 93, 94, 95, 96, 97, 98, 99, 100, 101, 102, 103, 104, 105, 106, 107, 108, 109, 110, 111, 112, 113, 114, 115, 116, 117, 118, 119, 120, 121, 122, 123, 124, 125, 126, 127, 128, 129, 130, 131, 132, 133, 134, 135, 136, 137, 138, 139, 140, 141, 142, 143, 144, 145, 146, 147, 148, 149, 150, 151, 152, 153, 154, 155, 156, 157, 158, 159, 160, 161, 162, 163, 164, 165, 166, 167, 168, 169, 170, 171, 172, 173, 174, 175, 176, 177, 178, 179, 180, 181, 182, 183, 184, 185, 186, 187, 188, 189, 190, 191, 192, 193, 194, 195, 196, 197, 198, 199, 200, 201, 202, 203, 204, 205, 206, 207, 208, 209, 210, 211, 212, 213, 214, 215, 216, 217, 218, 219, 220, 221, 222, 223, 224, 225, 226, 227, 228, 229, 230, 231, 232, 233, 234, 235, 236, 237, 238, 239, 240, 241, 242, 243, 244, 245, 246, 247, 248, 249, 250, 251, 252, 253, 254, 255, 256, 257, 258, 259, 260, 261, 262, 263, 264, 265, 266, 267, 268, 269, 270, 271, 272, 273, 274, 275, 276, 277, 278, 279, 280, 281, 282, 283, 284, 285, 286, 287, 288, 289, 290, 291, 292, 293, 294, 295, 296, 297, 298, 299, 300, 301, 312, or 313, a variant, derivative, orthologue, paralogue or homologue thereof, in which:

[0380] the amino acid at Mutated site 1 is Ala, and the amino acid at Mutated site 5 is Val.

[0381] In another preferred embodiment, the mutated PPO comprises a sequence of SEQ ID NO: 1, 2, 3, 4, 5, 6, 7, 8, 9, 10, 11, 12, 13, 14, 15, 16, 17, 18, 19, 20, 21, 22, 23, 24, 25, 26, 27, 28, 29, 30, 31, 32, 33, 34, 35, 36, 37, 38, 39, 40, 41, 42, 43, 44, 45, 46, 47, 48, 49, 50, 51, 52, 53, 54, 55, 56, 57, 58, 59, 60, 61, 62, 63, 64, 65, 66, 67, 68, 69, 70, 71, 72, 73, 74, 75, 76, 77, 78, 79, 80, 81, 82, 83, 84, 85, 86, 87, 88, 89, 90, 91, 92, 93, 94, 95, 96, 97, 98, 99, 100, 101, 102, 103, 104, 105, 106, 107, 108, 109, 110, 111, 112, 113, 114, 115, 116, 117, 118, 119, 120, 121, 122, 123, 124, 125, 126, 127, 128, 129, 130, 131, 132, 133, 134, 135, 136, 137, 138, 139, 140, 141, 142, 143, 144, 145, 146, 147, 148, 149, 150, 151, 152, 153, 154, 155, 156, 157, 158, 159, 160, 161, 162, 163, 164, 165, 166, 167, 168, 169, 170, 171, 172, 173, 174, 175, 176, 177, 178, 179, 180, 181, 182, 183, 184, 185, 186, 187, 188, 189, 190, 191, 192, 193, 194, 195, 196, 197, 198, 199, 200, 201, 202, 203, 204, 205, 206, 207, 208, 209, 210, 211, 212, 213, 214, 215, 216, 217, 218, 219, 220, 221, 222, 223, 224, 225, 226, 227, 228, 229, 230, 231, 232, 233, 234, 235, 236, 237, 238, 239, 240, 241, 242, 243, 244, 245, 246, 247, 248, 249, 250, 251, 252, 253, 254, 255, 256, 257, 258, 259, 260, 261, 262, 263, 264, 265, 266, 267, 268, 269, 270, 271, 272, 273, 274, 275, 276, 277, 278, 279, 280, 281, 282, 283, 284, 285, 286, 287, 288, 289, 290, 291, 292, 293, 294, 295, 296, 297, 298, 299, 300, 301, 312, or 313, a variant, derivative, orthologue, paralogue or homologue thereof, in which:

[0382] the amino acid at Mutated site 1 is Ala, and the amino acid at Mutated site 5 is Ile.

[0383] In another preferred embodiment, the mutated PPO comprises a sequence of SEQ ID NO: 1, 2, 3, 4, 5, 6, 7, 8, 9, 10, 11, 12, 13, 14, 15, 16, 17, 18, 19, 20, 21, 22, 23, 24, 25, 26, 27, 28, 29, 30, 31, 32, 33, 34, 35, 36, 37, 38, 39, 40, 41, 42, 43, 44, 45, 46, 47, 48, 49, 50, 51, 52, 53, 54, 55, 56, 57, 58, 59, 60, 61, 62, 63, 64, 65, 66, 67, 68, 69, 70, 71, 72, 73, 74, 75, 76, 77, 78, 79, 80, 81, 82, 83, 84, 85, 86, 87, 88, 89, 90, 91, 92, 93, 94, 95, 96, 97, 98, 99, 100, 101, 102, 103, 104, 105, 106, 107, 108, 109, 110, 111, 112, 113, 114, 115, 116, 117, 118, 119, 120, 121, 122, 123, 124, 125, 126, 127, 128, 129, 130, 131, 132, 133, 134, 135, 136, 137, 138, 139, 140, 141, 142, 143, 144, 145, 146, 147, 148, 149, 150, 151, 152, 153, 154, 155, 156, 157, 158, 159, 160, 161, 162, 163, 164, 165, 166, 167, 168, 169, 170, 171, 172, 173, 174, 175, 176, 177, 178, 179, 180, 181, 182, 183, 184, 185, 186, 187, 188, 189, 190, 191, 192, 193, 194, 195, 196, 197, 198, 199, 200, 201, 202, 203, 204, 205, 206, 207, 208, 209, 210, 211, 212, 213, 214, 215, 216, 217, 218, 219, 220, 221, 222, 223, 224, 225, 226, 227, 228, 229, 230, 231, 232, 233, 234, 235, 236, 237, 238, 239, 240, 241, 242, 243, 244, 245, 246, 247, 248, 249, 250, 251, 252, 253, 254, 255, 256, 257, 258, 259, 260, 261, 262, 263, 264, 265, 266, 267, 268, 269, 270, 271, 272, 273, 274, 275, 276, 277, 278, 279, 280, 281, 282, 283, 284, 285, 286, 287, 288, 289, 290, 291, 292, 293, 294, 295, 296, 297, 298, 299, 300, 301, 312, or 313, a variant, derivative, orthologue, paralogue or homologue thereof, in which:

[0384] the amino acid at Mutated site 1 is Ala, and the amino acid at Mutated site 5 is Met.

[0385] In another preferred embodiment, the mutated PPO comprises a sequence of SEQ ID NO: 1, 2, 3, 4, 5, 6, 7, 8, 9, 10, 11, 12, 13, 14, 15, 16, 17, 18, 19, 20, 21, 22, 23, 24, 25, 26, 27, 28, 29, 30, 31, 32, 33, 34, 35, 36, 37, 38, 39, 40, 41, 42, 43, 44, 45, 46, 47, 48, 49, 50, 51, 52, 53, 54, 55, 56, 57, 58, 59, 60, 61, 62, 63, 64, 65, 66, 67, 68, 69, 70, 71, 72, 73, 74, 75, 76, 77, 78, 79, 80, 81, 82, 83, 84, 85, 86, 87, 88, 89, 90, 91, 92, 93, 94, 95, 96, 97, 98, 99, 100, 101, 102, 103, 104, 105, 106, 107, 108, 109, 110, 111, 112, 113, 114, 115, 116, 117, 118, 119, 120, 121, 122, 123, 124, 125, 126, 127, 128, 129, 130, 131, 132, 133, 134, 135, 136, 137, 138, 139, 140, 141, 142, 143, 144, 145, 146, 147, 148, 149, 150, 151, 152, 153, 154, 155, 156, 157, 158, 159, 160, 161, 162, 163, 164, 165, 166, 167, 168, 169, 170, 171, 172, 173, 174, 175, 176, 177, 178, 179, 180, 181, 182, 183, 184, 185, 186, 187, 188, 189, 190, 191, 192, 193, 194, 195, 196, 197, 198, 199, 200, 201, 202, 203, 204, 205, 206, 207, 208, 209, 210, 211, 212, 213, 214, 215, 216, 217, 218, 219, 220, 221, 222, 223, 224, 225, 226, 227, 228, 229, 230, 231, 232, 233, 234, 235, 236, 237, 238, 239, 240, 241, 242, 243, 244, 245, 246, 247, 248, 249, 250, 251, 252, 253, 254, 255, 256, 257, 258, 259, 260, 261, 262, 263, 264, 265, 266, 267, 268, 269, 270, 271, 272, 273, 274, 275, 276, 277, 278, 279, 280, 281, 282, 283, 284, 285, 286, 287, 288, 289, 290, 291, 292, 293, 294, 295, 296, 297, 298, 299, 300, 301, 312, or 313, a variant, derivative, orthologue, paralogue or homologue thereof, in which:

[0386] the amino acid at Mutated site 1 is Val, and the amino acid at Mutated site 5 is Ala.

[0387] In another preferred embodiment, the mutated PPO comprises a sequence of SEQ ID NO: 1, 2, 3, 4, 5, 6, 7, 8, 9, 10, 11, 12, 13, 14, 15, 16, 17, 18, 19, 20, 21, 22, 23, 24, 25, 26, 27, 28, 29, 30, 31, 32, 33, 34, 35, 36, 37, 38, 39, 40, 41, 42, 43, 44, 45, 46, 47, 48, 49, 50, 51, 52, 53, 54, 55, 56, 57, 58, 59, 60, 61, 62, 63, 64, 65, 66, 67, 68, 69, 70, 71, 72, 73, 74, 75, 76, 77, 78, 79, 80, 81, 82, 83, 84, 85, 86, 87, 88, 89, 90, 91, 92, 93, 94, 95, 96, 97, 98, 99, 100, 101, 102, 103, 104, 105, 106, 107, 108, 109, 110, 111, 112, 113, 114, 115, 116, 117, 118, 119, 120, 121, 122, 123, 124, 125, 126, 127, 128, 129, 130, 131, 132, 133, 134, 135, 136, 137, 138, 139, 140, 141, 142, 143, 144, 145, 146, 147, 148, 149, 150, 151, 152, 153, 154, 155, 156, 157, 158, 159, 160, 161, 162, 163, 164, 165, 166, 167, 168, 169, 170, 171, 172, 173, 174, 175, 176, 177, 178, 179, 180, 181, 182, 183, 184, 185, 186, 187, 188, 189, 190, 191, 192, 193, 194, 195, 196, 197, 198, 199, 200, 201, 202, 203, 204, 205, 206, 207, 208, 209, 210, 211, 212, 213, 214, 215, 216, 217, 218, 219, 220, 221, 222, 223, 224, 225, 226, 227, 228, 229, 230, 231, 232, 233, 234, 235, 236, 237, 238, 239, 240, 241, 242, 243, 244, 245, 246, 247, 248, 249, 250, 251, 252, 253, 254, 255, 256, 257, 258, 259, 260, 261, 262, 263, 264, 265, 266, 267, 268, 269, 270, 271, 272, 273, 274, 275, 276, 277, 278, 279, 280, 281, 282, 283, 284, 285, 286, 287, 288, 289, 290, 291, 292, 293, 294, 295, 296, 297, 298, 299, 300, 301, 312, or 313, a variant, derivative, orthologue, paralogue or homologue thereof, in which:

[0388] the amino acid at Mutated site 1 is Val, and the amino acid at Mutated site 5 is Leu.

[0389] In another preferred embodiment, the mutated PPO comprises a sequence of SEQ ID NO: 1, 2, 3, 4, 5, 6, 7, 8, 9, 10, 11, 12, 13, 14, 15, 16, 17, 18, 19, 20, 21, 22, 23, 24, 25, 26, 27, 28, 29, 30, 31, 32, 33, 34, 35, 36, 37, 38, 39, 40, 41, 42, 43, 44, 45, 46, 47, 48, 49, 50, 51, 52, 53, 54, 55, 56, 57, 58, 59, 60, 61, 62, 63, 64, 65, 66, 67, 68, 69, 70, 71, 72, 73, 74, 75, 76, 77, 78, 79, 80, 81, 82, 83, 84, 85, 86, 87, 88, 89, 90, 91, 92, 93, 94, 95, 96, 97, 98, 99, 100, 101, 102, 103, 104, 105, 106, 107, 108, 109, 110, 111, 112, 113, 114, 115, 116, 117, 118, 119, 120, 121, 122, 123, 124, 125, 126, 127, 128, 129, 130, 131, 132, 133, 134, 135, 136, 137, 138, 139, 140, 141, 142, 143, 144, 145, 146, 147, 148, 149, 150, 151, 152, 153, 154, 155, 156, 157, 158, 159, 160, 161, 162, 163, 164, 165, 166, 167, 168, 169, 170, 171, 172, 173, 174, 175, 176, 177, 178, 179, 180, 181, 182, 183, 184, 185, 186, 187, 188, 189, 190, 191, 192, 193, 194, 195, 196, 197, 198, 199, 200, 201, 202, 203, 204, 205, 206, 207, 208, 209, 210, 211, 212, 213, 214, 215, 216, 217, 218, 219, 220, 221, 222, 223, 224, 225, 226, 227, 228, 229, 230, 231, 232, 233, 234, 235, 236, 237, 238, 239, 240, 241, 242, 243, 244, 245, 246, 247, 248, 249, 250, 251, 252, 253, 254, 255, 256, 257, 258, 259, 260, 261, 262, 263, 264, 265, 266, 267, 268, 269, 270, 271, 272, 273, 274, 275, 276, 277, 278, 279, 280, 281, 282, 283, 284, 285, 286, 287, 288, 289, 290, 291, 292, 293, 294, 295, 296, 297, 298, 299, 300, 301, 312, or 313, a variant, derivative, orthologue, paralogue or homologue thereof, in which:

[0390] the amino acid at Mutated site 1 is Val, and the amino acid at Mutated site 5 is Val.

[0391] In another preferred embodiment, the mutated PPO comprises a sequence of SEQ ID NO: 1, 2, 3, 4, 5, 6, 7, 8, 9, 10, 11, 12, 13, 14, 15, 16, 17, 18, 19, 20, 21, 22, 23, 24, 25, 26, 27, 28, 29, 30, 31, 32, 33, 34, 35, 36, 37, 38, 39, 40, 41, 42, 43, 44, 45, 46, 47, 48, 49, 50, 51, 52, 53, 54, 55, 56, 57, 58, 59, 60, 61, 62, 63, 64, 65, 66, 67, 68, 69, 70, 71, 72, 73, 74, 75, 76, 77, 78, 79, 80, 81, 82, 83, 84, 85, 86, 87, 88, 89, 90, 91, 92, 93, 94, 95, 96, 97, 98, 99, 100, 101, 102, 103, 104, 105, 106, 107, 108, 109, 110, 111, 112, 113, 114, 115, 116, 117, 118, 119, 120, 121, 122, 123, 124, 125, 126, 127, 128, 129, 130, 131, 132, 133, 134, 135, 136, 137, 138, 139, 140, 141, 142, 143, 144, 145, 146, 147, 148, 149, 150, 151, 152, 153, 154, 155, 156, 157, 158, 159, 160, 161, 162, 163, 164, 165, 166, 167, 168, 169, 170, 171, 172, 173, 174, 175, 176, 177, 178, 179, 180, 181, 182, 183, 184, 185, 186, 187, 188, 189, 190, 191, 192, 193, 194, 195, 196, 197, 198, 199, 200, 201, 202, 203, 204, 205, 206, 207, 208, 209, 210, 211, 212, 213, 214, 215, 216, 217, 218, 219, 220, 221, 222, 223, 224, 225, 226, 227, 228, 229, 230, 231, 232, 233, 234, 235, 236, 237, 238, 239, 240, 241, 242, 243, 244, 245, 246, 247, 248, 249, 250, 251, 252, 253, 254, 255, 256, 257, 258, 259, 260, 261, 262, 263, 264, 265, 266, 267, 268, 269, 270, 271, 272, 273, 274, 275, 276, 277, 278, 279, 280, 281, 282, 283, 284, 285, 286, 287, 288, 289, 290, 291, 292, 293, 294, 295, 296, 297, 298, 299, 300, 301, 312, or 313, a variant, derivative, orthologue, paralogue or homologue thereof, in which:

[0392] the amino acid at Mutated site 1 is Val, and the amino acid at Mutated site 5 is Ile.

[0393] In another preferred embodiment, the mutated PPO comprises a sequence of SEQ ID NO: 1, 2, 3, 4, 5, 6, 7, 8, 9, 10, 11, 12, 13, 14, 15, 16, 17, 18, 19, 20, 21, 22, 23, 24, 25, 26, 27, 28, 29, 30, 31, 32, 33, 34, 35, 36, 37, 38, 39, 40, 41, 42, 43, 44, 45, 46, 47, 48, 49, 50, 51, 52, 53, 54, 55, 56, 57, 58, 59, 60, 61, 62, 63, 64, 65, 66, 67, 68, 69, 70, 71, 72, 73, 74, 75, 76, 77, 78, 79, 80, 81, 82, 83, 84, 85, 86, 87, 88, 89, 90, 91, 92, 93, 94, 95, 96, 97, 98, 99, 100, 101, 102, 103, 104, 105, 106, 107, 108, 109, 110, 111, 112, 113, 114, 115, 116, 117, 118, 119, 120, 121, 122, 123, 124, 125, 126, 127, 128, 129, 130, 131, 132, 133, 134, 135, 136, 137, 138, 139, 140, 141, 142, 143, 144, 145, 146, 147, 148, 149, 150, 151, 152, 153, 154, 155, 156, 157, 158, 159, 160, 161, 162, 163, 164, 165, 166, 167, 168, 169, 170, 171, 172, 173, 174, 175, 176, 177, 178, 179, 180, 181, 182, 183, 184, 185, 186, 187, 188, 189, 190, 191, 192, 193, 194, 195, 196, 197, 198, 199, 200, 201, 202, 203, 204, 205, 206, 207, 208, 209, 210, 211, 212, 213, 214, 215, 216, 217, 218, 219, 220, 221, 222, 223, 224, 225, 226, 227, 228, 229, 230, 231, 232, 233, 234, 235, 236, 237, 238, 239, 240, 241, 242, 243, 244, 245, 246, 247, 248, 249, 250, 251, 252, 253, 254, 255, 256, 257, 258, 259, 260, 261, 262, 263, 264, 265, 266, 267, 268, 269, 270, 271, 272, 273, 274, 275, 276, 277, 278, 279, 280, 281, 282, 283, 284, 285, 286, 287, 288, 289, 290, 291, 292, 293, 294, 295, 296, 297, 298, 299, 300, 301, 312, or 313, a variant, derivative, orthologue, paralogue or homologue thereof, in which:

[0394] the amino acid at Mutated site 1 is Val, and the amino acid at Mutated site 5 is Met.

[0395] In another preferred embodiment, the mutated PPO comprises a sequence of SEQ ID NO: 1, 2, 3, 4, 5, 6, 7, 8, 9, 10, 11, 12, 13, 14, 15, 16, 17, 18, 19, 20, 21, 22, 23, 24, 25, 26, 27, 28, 29, 30, 31, 32, 33, 34, 35, 36, 37, 38, 39, 40, 41, 42, 43, 44, 45, 46, 47, 48, 49, 50, 51, 52, 53, 54, 55, 56, 57, 58, 59, 60, 61, 62, 63, 64, 65, 66, 67, 68, 69, 70, 71, 72, 73, 74, 75, 76, 77, 78, 79, 80, 81, 82, 83, 84, 85, 86, 87, 88, 89, 90, 91, 92, 93, 94, 95, 96, 97, 98, 99, 100, 101, 102, 103, 104, 105, 106, 107, 108, 109, 110, 111, 112, 113, 114, 115, 116, 117, 118, 119, 120, 121, 122, 123, 124, 125, 126, 127, 128, 129, 130, 131, 132, 133, 134, 135, 136, 137, 138, 139, 140, 141, 142, 143, 144, 145, 146, 147, 148, 149, 150, 151, 152, 153, 154, 155, 156, 157, 158, 159, 160, 161, 162, 163, 164, 165, 166, 167, 168, 169, 170, 171, 172, 173, 174, 175, 176, 177, 178, 179, 180, 181, 182, 183, 184, 185, 186, 187, 188, 189, 190, 191, 192, 193, 194, 195, 196, 197, 198, 199, 200, 201, 202, 203, 204, 205, 206, 207, 208, 209, 210, 211, 212, 213, 214, 215, 216, 217, 218, 219, 220, 221, 222, 223, 224, 225, 226, 227, 228, 229, 230, 231, 232, 233, 234, 235, 236, 237, 238, 239, 240, 241, 242, 243, 244, 245, 246, 247, 248, 249, 250, 251, 252, 253, 254, 255, 256, 257, 258, 259, 260, 261, 262, 263, 264, 265, 266, 267, 268, 269, 270, 271, 272, 273, 274, 275, 276, 277, 278, 279, 280, 281, 282, 283, 284, 285, 286, 287, 288, 289, 290, 291, 292, 293, 294, 295, 296, 297, 298, 299, 300, 301, 312, or 313, a variant, derivative, orthologue, paralogue or homologue thereof, in which:

[0396] the amino acid at Mutated site 1 is Ile, and the amino acid at Mutated site 5 is Ala.

[0397] In another preferred embodiment, the mutated PPO comprises a sequence of SEQ ID NO: 1, 2, 3, 4, 5, 6, 7, 8, 9, 10, 11, 12, 13, 14, 15, 16, 17, 18, 19, 20, 21, 22, 23, 24, 25, 26, 27, 28, 29, 30, 31, 32, 33, 34, 35, 36, 37, 38, 39, 40, 41, 42, 43, 44, 45, 46, 47, 48, 49, 50, 51, 52, 53, 54, 55, 56, 57, 58, 59, 60, 61, 62, 63, 64, 65, 66, 67, 68, 69, 70, 71, 72, 73, 74, 75, 76, 77, 78, 79, 80, 81, 82, 83, 84, 85, 86, 87, 88, 89, 90, 91, 92, 93, 94, 95, 96, 97, 98, 99, 100, 101, 102, 103, 104, 105, 106, 107, 108, 109, 110, 111, 112, 113, 114, 115, 116, 117, 118, 119, 120, 121, 122, 123, 124, 125, 126, 127, 128, 129, 130, 131, 132, 133, 134, 135, 136, 137, 138, 139, 140, 141, 142, 143, 144, 145, 146, 147, 148, 149, 150, 151, 152, 153, 154, 155, 156, 157, 158, 159, 160, 161, 162, 163, 164, 165, 166, 167, 168, 169, 170, 171, 172, 173, 174, 175, 176, 177, 178, 179, 180, 181, 182, 183, 184, 185, 186, 187, 188, 189, 190, 191, 192, 193, 194, 195, 196, 197, 198, 199, 200, 201, 202, 203, 204, 205, 206, 207, 208, 209, 210, 211, 212, 213, 214, 215, 216, 217, 218, 219, 220, 221, 222, 223, 224, 225, 226, 227, 228, 229, 230, 231, 232, 233, 234, 235, 236, 237, 238, 239, 240, 241, 242, 243, 244, 245, 246, 247, 248, 249, 250, 251, 252, 253, 254, 255, 256, 257, 258, 259, 260, 261, 262, 263, 264, 265, 266, 267, 268, 269, 270, 271, 272, 273, 274, 275, 276, 277, 278, 279, 280, 281, 282, 283, 284, 285, 286, 287, 288, 289, 290, 291, 292, 293, 294, 295, 296, 297, 298, 299, 300, 301, 312, or 313, a variant, derivative, orthologue, paralogue or homologue thereof, in which:

[0398] the amino acid at Mutated site 1 is Ile, and the amino acid at Mutated site 5 is Leu.

[0399] In another preferred embodiment, the mutated PPO comprises a sequence of SEQ ID NO: 1, 2, 3, 4, 5, 6, 7, 8, 9, 10, 11, 12, 13, 14, 15, 16, 17, 18, 19, 20, 21, 22, 23, 24, 25, 26, 27, 28, 29, 30, 31, 32, 33, 34, 35, 36, 37, 38, 39, 40, 41, 42, 43, 44, 45, 46, 47, 48, 49, 50, 51, 52, 53, 54, 55, 56, 57, 58, 59, 60, 61, 62, 63, 64, 65, 66, 67, 68, 69, 70, 71, 72, 73, 74, 75, 76, 77, 78, 79, 80, 81, 82, 83, 84, 85, 86, 87, 88, 89, 90, 91, 92, 93, 94, 95, 96, 97, 98, 99, 100, 101, 102, 103, 104, 105, 106, 107, 108, 109, 110, 111, 112, 113, 114, 115, 116, 117, 118, 119, 120, 121, 122, 123, 124, 125, 126, 127, 128, 129, 130, 131, 132, 133, 134, 135, 136, 137, 138, 139, 140, 141, 142, 143, 144, 145, 146, 147, 148, 149, 150, 151, 152, 153, 154, 155, 156, 157, 158, 159, 160, 161, 162, 163, 164, 165, 166, 167, 168, 169, 170, 171, 172, 173, 174, 175, 176, 177, 178, 179, 180, 181, 182, 183, 184, 185, 186, 187, 188, 189, 190, 191, 192, 193, 194, 195, 196, 197, 198, 199, 200, 201, 202, 203, 204, 205, 206, 207, 208, 209, 210, 211, 212, 213, 214, 215, 216, 217, 218, 219, 220, 221, 222, 223, 224, 225, 226, 227, 228, 229, 230, 231, 232, 233, 234, 235, 236, 237, 238, 239, 240, 241, 242, 243, 244, 245, 246, 247, 248, 249, 250, 251, 252, 253, 254, 255, 256, 257, 258, 259, 260, 261, 262, 263, 264, 265, 266, 267, 268, 269, 270, 271, 272, 273, 274, 275, 276, 277, 278, 279, 280, 281, 282, 283, 284, 285, 286, 287, 288, 289, 290, 291, 292, 293, 294, 295, 296, 297, 298, 299, 300, 301, 312, or 313, a variant, derivative, orthologue, paralogue or homologue thereof, in which:

[0400] the amino acid at Mutated site 1 is Ile, and the amino acid at Mutated site 5 is Val.

[0401] In another preferred embodiment, the mutated PPO comprises a sequence of SEQ ID NO: 1, 2, 3, 4, 5, 6, 7, 8, 9, 10, 11, 12, 13, 14, 15, 16, 17, 18, 19, 20, 21, 22, 23, 24, 25, 26, 27, 28, 29, 30, 31, 32, 33, 34, 35, 36, 37, 38, 39, 40, 41, 42, 43, 44, 45, 46, 47, 48, 49, 50, 51, 52, 53, 54, 55, 56, 57, 58, 59, 60, 61, 62, 63, 64, 65, 66, 67, 68, 69, 70, 71, 72, 73, 74, 75, 76, 77, 78, 79, 80, 81, 82, 83, 84, 85, 86, 87, 88, 89, 90, 91, 92, 93, 94, 95, 96, 97, 98, 99, 100, 101, 102, 103, 104, 105, 106, 107, 108, 109, 110, 111, 112, 113, 114, 115, 116, 117, 118, 119, 120, 121, 122, 123, 124, 125, 126, 127, 128, 129, 130, 131, 132, 133, 134, 135, 136, 137, 138, 139, 140, 141, 142, 143, 144, 145, 146, 147, 148, 149, 150, 151, 152, 153, 154, 155, 156, 157, 158, 159, 160, 161, 162, 163, 164, 165, 166, 167, 168, 169, 170, 171, 172, 173, 174, 175, 176, 177, 178, 179, 180, 181, 182, 183, 184, 185, 186, 187, 188, 189, 190, 191, 192, 193, 194, 195, 196, 197, 198, 199, 200, 201, 202, 203, 204, 205, 206, 207, 208, 209, 210, 211, 212, 213, 214, 215, 216, 217, 218, 219, 220, 221, 222, 223, 224, 225, 226, 227, 228, 229, 230, 231, 232, 233, 234, 235, 236, 237, 238, 239, 240, 241, 242, 243, 244, 245, 246, 247, 248, 249, 250, 251, 252, 253, 254, 255, 256, 257, 258, 259, 260, 261, 262, 263, 264, 265, 266, 267, 268, 269, 270, 271, 272, 273, 274, 275, 276, 277, 278, 279, 280, 281, 282, 283, 284, 285, 286, 287, 288, 289, 290, 291, 292, 293, 294, 295, 296, 297, 298, 299, 300, 301, 312, or 313, a variant, derivative, orthologue, paralogue or homologue thereof, in which:

[0402] the amino acid at Mutated site 1 is Ile, and the amino acid at Mutated site 5 is Ile.

[0403] In another preferred embodiment, the mutated PPO comprises a sequence of SEQ ID NO: 1, 2, 3, 4, 5, 6, 7, 8, 9, 10, 11, 12, 13, 14, 15, 16, 17, 18, 19, 20, 21, 22, 23, 24, 25, 26, 27, 28, 29, 30, 31, 32, 33, 34, 35, 36, 37, 38, 39, 40, 41, 42, 43, 44, 45, 46, 47, 48, 49, 50, 51, 52, 53, 54, 55, 56, 57, 58, 59, 60, 61, 62, 63, 64, 65, 66, 67, 68, 69, 70, 71, 72, 73, 74, 75, 76, 77, 78, 79, 80, 81, 82, 83, 84, 85, 86, 87, 88, 89, 90, 91, 92, 93, 94, 95, 96, 97, 98, 99, 100, 101, 102, 103, 104, 105, 106, 107, 108, 109, 110, 111, 112, 113, 114, 115, 116, 117, 118, 119, 120, 121, 122, 123, 124, 125, 126, 127, 128, 129, 130, 131, 132, 133, 134, 135, 136, 137, 138, 139, 140, 141, 142, 143, 144, 145, 146, 147, 148, 149, 150, 151, 152, 153, 154, 155, 156, 157, 158, 159, 160, 161, 162, 163, 164, 165, 166, 167, 168, 169, 170, 171, 172, 173, 174, 175, 176, 177, 178, 179, 180, 181, 182, 183, 184, 185, 186, 187, 188, 189, 190, 191, 192, 193, 194, 195, 196, 197, 198, 199, 200, 201, 202, 203, 204, 205, 206, 207, 208, 209, 210, 211, 212, 213, 214, 215, 216, 217, 218, 219, 220, 221, 222, 223, 224, 225, 226, 227, 228, 229, 230, 231, 232, 233, 234, 235, 236, 237, 238, 239, 240, 241, 242, 243, 244, 245, 246, 247, 248, 249, 250, 251, 252, 253, 254, 255, 256, 257, 258, 259, 260, 261, 262, 263, 264, 265, 266, 267, 268, 269, 270, 271, 272, 273, 274, 275, 276, 277, 278, 279, 280, 281, 282, 283, 284, 285, 286, 287, 288, 289, 290, 291, 292, 293, 294, 295, 296, 297, 298, 299, 300, 301, 312, or 313, a variant, derivative, orthologue, paralogue or homologue thereof, in which:

[0404] the amino acid at Mutated site 1 is Ile, and the amino acid at Mutated site 5 is Met.

[0405] In another preferred embodiment, the mutated PPO comprises a sequence of SEQ ID NO: 1, 2, 3, 4, 5, 6, 7, 8, 9, 10, 11, 12, 13, 14, 15, 16, 17, 18, 19, 20, 21, 22, 23, 24, 25, 26, 27, 28, 29, 30, 31, 32, 33, 34, 35, 36, 37, 38, 39, 40, 41, 42, 43, 44, 45, 46, 47, 48, 49, 50, 51, 52, 53, 54, 55, 56, 57, 58, 59, 60, 61, 62, 63, 64, 65, 66, 67, 68, 69, 70, 71, 72, 73, 74, 75, 76, 77, 78, 79, 80, 81, 82, 83, 84, 85, 86, 87, 88, 89, 90, 91, 92, 93, 94, 95, 96, 97, 98, 99, 100, 101, 102, 103, 104, 105, 106, 107, 108, 109, 110, 111, 112, 113, 114, 115, 116, 117, 118, 119, 120, 121, 122, 123, 124, 125, 126, 127, 128, 129, 130, 131, 132, 133, 134, 135, 136, 137, 138, 139, 140, 141, 142, 143, 144, 145, 146, 147, 148, 149, 150, 151, 152, 153, 154, 155, 156, 157, 158, 159, 160, 161, 162, 163, 164, 165, 166, 167, 168, 169, 170, 171, 172, 173, 174, 175, 176, 177, 178, 179, 180, 181, 182, 183, 184, 185, 186, 187, 188, 189, 190, 191, 192, 193, 194, 195, 196, 197, 198, 199, 200, 201, 202, 203, 204, 205, 206, 207, 208, 209, 210, 211, 212, 213, 214, 215, 216, 217, 218, 219, 220, 221, 222, 223, 224, 225, 226, 227, 228, 229, 230, 231, 232, 233, 234, 235, 236, 237, 238, 239, 240, 241, 242, 243, 244, 245, 246, 247, 248, 249, 250, 251, 252, 253, 254, 255, 256, 257, 258, 259, 260, 261, 262, 263, 264, 265, 266, 267, 268, 269, 270, 271, 272, 273, 274, 275, 276, 277, 278, 279, 280, 281, 282, 283, 284, 285, 286, 287, 288, 289, 290, 291, 292, 293, 294, 295, 296, 297, 298, 299, 300, 301, 312, or 313, a variant, derivative, orthologue, paralogue or homologue thereof, in which:

[0406] the amino acid at Mutated site 1 is Met, and the amino acid at Mutated site 5 is Ala.

[0407] In another preferred embodiment, the mutated PPO comprises a sequence of SEQ ID NO: 1, 2, 3, 4, 5, 6, 7, 8, 9, 10, 11, 12, 13, 14, 15, 16, 17, 18, 19, 20, 21, 22, 23, 24, 25, 26, 27, 28, 29, 30, 31, 32, 33, 34, 35, 36, 37, 38, 39, 40, 41, 42, 43, 44, 45, 46, 47, 48, 49, 50, 51, 52, 53, 54, 55, 56, 57, 58, 59, 60, 61, 62, 63, 64, 65, 66, 67, 68, 69, 70, 71, 72, 73, 74, 75, 76, 77, 78, 79, 80, 81, 82, 83, 84, 85, 86, 87, 88, 89, 90, 91, 92, 93, 94, 95, 96, 97, 98, 99, 100, 101, 102, 103, 104, 105, 106, 107, 108, 109, 110, 111, 112, 113, 114, 115, 116, 117, 118, 119, 120, 121, 122, 123, 124, 125, 126, 127, 128, 129, 130, 131, 132, 133, 134, 135, 136, 137, 138, 139, 140, 141, 142, 143, 144, 145, 146, 147, 148, 149, 150, 151, 152, 153, 154, 155, 156, 157, 158, 159, 160, 161, 162, 163, 164, 165, 166, 167, 168, 169, 170, 171, 172, 173, 174, 175, 176, 177, 178, 179, 180, 181, 182, 183, 184, 185, 186, 187, 188, 189, 190, 191, 192, 193, 194, 195, 196, 197, 198, 199, 200, 201, 202, 203, 204, 205, 206, 207, 208, 209, 210, 211, 212, 213, 214, 215, 216, 217, 218, 219, 220, 221, 222, 223, 224, 225, 226, 227, 228, 229, 230, 231, 232, 233, 234, 235, 236, 237, 238, 239, 240, 241, 242, 243, 244, 245, 246, 247, 248, 249, 250, 251, 252, 253, 254, 255, 256, 257, 258, 259, 260, 261, 262, 263, 264, 265, 266, 267, 268, 269, 270, 271, 272, 273, 274, 275, 276, 277, 278, 279, 280, 281, 282, 283, 284, 285, 286, 287, 288, 289, 290, 291, 292, 293, 294, 295, 296, 297, 298, 299, 300, 301, 312, or 313, a variant, derivative, orthologue, paralogue or homologue thereof, in which:

[0408] the amino acid at Mutated site 1 is Met, and the amino acid at Mutated site 5 is Leu.

[0409] In another preferred embodiment, the mutated PPO comprises a sequence of SEQ ID NO: 1, 2, 3, 4, 5, 6, 7, 8, 9, 10, 11, 12, 13, 14, 15, 16, 17, 18, 19, 20, 21, 22, 23, 24, 25, 26, 27, 28, 29, 30, 31, 32, 33, 34, 35, 36, 37, 38, 39, 40, 41, 42, 43, 44, 45, 46, 47, 48, 49, 50, 51, 52, 53, 54, 55, 56, 57, 58, 59, 60, 61, 62, 63, 64, 65, 66, 67, 68, 69, 70, 71, 72, 73, 74, 75, 76, 77, 78, 79, 80, 81, 82, 83, 84, 85, 86, 87, 88, 89, 90, 91, 92, 93, 94, 95, 96, 97, 98, 99, 100, 101, 102, 103, 104, 105, 106, 107, 108, 109, 110, 111, 112, 113, 114, 115, 116, 117, 118, 119, 120, 121, 122, 123, 124, 125, 126, 127, 128, 129, 130, 131, 132, 133, 134, 135, 136, 137, 138, 139, 140, 141, 142, 143, 144, 145, 146, 147, 148, 149, 150, 151, 152, 153, 154, 155, 156, 157, 158, 159, 160, 161, 162, 163, 164, 165, 166, 167, 168, 169, 170, 171, 172, 173, 174, 175, 176, 177, 178, 179, 180, 181, 182, 183, 184, 185, 186, 187, 188, 189, 190, 191, 192, 193, 194, 195, 196, 197, 198, 199, 200, 201, 202, 203, 204, 205, 206, 207, 208, 209, 210, 211, 212, 213, 214, 215, 216, 217, 218, 219, 220, 221, 222, 223, 224, 225, 226, 227, 228, 229, 230, 231, 232, 233, 234, 235, 236, 237, 238, 239, 240, 241, 242, 243, 244, 245, 246, 247, 248, 249, 250, 251, 252, 253, 254, 255, 256, 257, 258, 259, 260, 261, 262, 263, 264, 265, 266, 267, 268, 269, 270, 271, 272, 273, 274, 275, 276, 277, 278, 279, 280, 281, 282, 283, 284, 285, 286, 287, 288, 289, 290, 291, 292, 293, 294, 295, 296, 297, 298, 299, 300, 301, 312, or 313, a variant, derivative, orthologue, paralogue or homologue thereof, in which:

[0410] the amino acid at Mutated site 1 is Met, and the amino acid at Mutated site 5 is Val.

[0411] In another preferred embodiment, the mutated PPO comprises a sequence of SEQ ID NO: 1, 2, 3, 4, 5, 6, 7, 8, 9, 10, 11, 12, 13, 14, 15, 16, 17, 18, 19, 20, 21, 22, 23, 24, 25, 26, 27, 28, 29, 30, 31, 32, 33, 34, 35, 36, 37, 38, 39, 40, 41, 42, 43, 44, 45, 46, 47, 48, 49, 50, 51, 52, 53, 54, 55, 56, 57, 58, 59, 60, 61, 62, 63, 64, 65, 66, 67, 68, 69, 70, 71, 72, 73, 74, 75, 76, 77, 78, 79, 80, 81, 82, 83, 84, 85, 86, 87, 88, 89, 90, 91, 92, 93, 94, 95, 96, 97, 98, 99, 100, 101, 102, 103, 104, 105, 106, 107, 108, 109, 110, 111, 112, 113, 114, 115, 116, 117, 118, 119, 120, 121, 122, 123, 124, 125, 126, 127, 128, 129, 130, 131, 132, 133, 134, 135, 136, 137, 138, 139, 140, 141, 142, 143, 144, 145, 146, 147, 148, 149, 150, 151, 152, 153, 154, 155, 156, 157, 158, 159, 160, 161, 162, 163, 164, 165, 166, 167, 168, 169, 170, 171, 172, 173, 174, 175, 176, 177, 178, 179, 180, 181, 182, 183, 184, 185, 186, 187, 188, 189, 190, 191, 192, 193, 194, 195, 196, 197, 198, 199, 200, 201, 202, 203, 204, 205, 206, 207, 208, 209, 210, 211, 212, 213, 214, 215, 216, 217, 218, 219, 220, 221, 222, 223, 224, 225, 226, 227, 228, 229, 230, 231, 232, 233, 234, 235, 236, 237, 238, 239, 240, 241, 242, 243, 244, 245, 246, 247, 248, 249, 250, 251, 252, 253, 254, 255, 256, 257, 258, 259, 260, 261, 262, 263, 264, 265, 266, 267, 268, 269, 270, 271, 272, 273, 274, 275, 276, 277, 278, 279, 280, 281, 282, 283, 284, 285, 286, 287, 288, 289, 290, 291, 292, 293, 294, 295, 296, 297, 298, 299, 300, 301, 312, or 313, a variant, derivative, orthologue, paralogue or homologue thereof, in which:

[0412] the amino acid at Mutated site 1 is Met, and the amino acid at Mutated site 5 is Ile.

[0413] In another preferred embodiment, the mutated PPO comprises a sequence of SEQ ID NO: 1, 2, 3, 4, 5, 6, 7, 8, 9, 10, 11, 12, 13, 14, 15, 16, 17, 18, 19, 20, 21, 22, 23, 24, 25, 26, 27, 28, 29, 30, 31, 32, 33, 34, 35, 36, 37, 38, 39, 40, 41, 42, 43, 44, 45, 46, 47, 48, 49, 50, 51, 52, 53, 54, 55, 56, 57, 58, 59, 60, 61, 62, 63, 64, 65, 66, 67, 68, 69, 70, 71, 72, 73, 74, 75, 76, 77, 78, 79, 80, 81, 82, 83, 84, 85, 86, 87, 88, 89, 90, 91, 92, 93, 94, 95, 96, 97, 98, 99, 100, 101, 102, 103, 104, 105, 106, 107, 108, 109, 110, 111, 112, 113, 114, 115, 116, 117, 118, 119, 120, 121, 122, 123, 124, 125, 126, 127, 128, 129, 130, 131, 132, 133, 134, 135, 136, 137, 138, 139, 140, 141, 142, 143, 144, 145, 146, 147, 148, 149, 150, 151, 152, 153, 154, 155, 156, 157, 158, 159, 160, 161, 162, 163, 164, 165, 166, 167, 168, 169, 170, 171, 172, 173, 174, 175, 176, 177, 178, 179, 180, 181, 182, 183, 184, 185, 186, 187, 188, 189, 190, 191, 192, 193, 194, 195, 196, 197, 198, 199, 200, 201, 202, 203, 204, 205, 206, 207, 208, 209, 210, 211, 212, 213, 214, 215, 216, 217, 218, 219, 220, 221, 222, 223, 224, 225, 226, 227, 228, 229, 230, 231, 232, 233, 234, 235, 236, 237, 238, 239, 240, 241, 242, 243, 244, 245, 246, 247, 248, 249, 250, 251, 252, 253, 254, 255, 256, 257, 258, 259, 260, 261, 262, 263, 264, 265, 266, 267, 268, 269, 270, 271, 272, 273, 274, 275, 276, 277, 278, 279, 280, 281, 282, 283, 284, 285, 286, 287, 288, 289, 290, 291, 292, 293, 294, 295, 296, 297, 298, 299, 300, 301, 312, or 313, a variant, derivative, orthologue, paralogue or homologue thereof, in which:

[0414] the amino acid at Mutated site 1 is Met, and the amino acid at Mutated site 5 is Met.

[0415] In another preferred embodiment, the mutated PPO comprises a sequence of SEQ ID NO: 1, 2, 3, 4, 5, 6, 7, 8, 9, 10, 11, 12, 13, 14, 15, 16, 17, 18, 19, 20, 21, 22, 23, 24, 25, 26, 27, 28, 29, 30, 31, 32, 33, 34, 35, 36, 37, 38, 39, 40, 41, 42, 43, 44, 45, 46, 47, 48, 49, 50, 51, 52, 53, 54, 55, 56, 57, 58, 59, 60, 61, 62, 63, 64, 65, 66, 67, 68, 69, 70, 71, 72, 73, 74, 75, 76, 77, 78, 79, 80, 81, 82, 83, 84, 85, 86, 87, 88, 89, 90, 91, 92, 93, 94, 95, 96, 97, 98, 99, 100, 101, 102, 103, 104, 105, 106, 107, 108, 109, 110, 111, 112, 113, 114, 115, 116, 117, 118, 119, 120, 121, 122, 123, 124, 125, 126, 127, 128, 129, 130, 131, 132, 133, 134, 135, 136, 137, 138, 139, 140, 141, 142, 143, 144, 145, 146, 147, 148, 149, 150, 151, 152, 153, 154, 155, 156, 157, 158, 159, 160, 161, 162, 163, 164, 165, 166, 167, 168, 169, 170, 171, 172, 173, 174, 175, 176, 177, 178, 179, 180, 181, 182, 183, 184, 185, 186, 187, 188, 189, 190, 191, 192, 193, 194, 195, 196, 197, 198, 199, 200, 201, 202, 203, 204, 205, 206, 207, 208, 209, 210, 211, 212, 213, 214, 215, 216, 217, 218, 219, 220, 221, 222, 223, 224, 225, 226, 227, 228, 229, 230, 231, 232, 233, 234, 235, 236, 237, 238, 239, 240, 241, 242, 243, 244, 245, 246, 247, 248, 249, 250, 251, 252, 253, 254, 255, 256, 257, 258, 259, 260, 261, 262, 263, 264, 265, 266, 267, 268, 269, 270, 271, 272, 273, 274, 275, 276, 277, 278, 279, 280, 281, 282, 283, 284, 285, 286, 287, 288, 289, 290, 291, 292, 293, 294, 295, 296, 297, 298, 299, 300, 301, 312, or 313, a variant, derivative, orthologue, paralogue or homologue thereof, in which:

[0416] the amino acid at Mutated site 1 is Tyr, and the amino acid at Mutated site 5 is Ala.

[0417] In another preferred embodiment, the mutated PPO comprises a sequence of SEQ ID NO: 1, 2, 3, 4, 5, 6, 7, 8, 9, 10, 11, 12, 13, 14, 15, 16, 17, 18, 19, 20, 21, 22, 23, 24, 25, 26, 27, 28, 29, 30, 31, 32, 33, 34, 35, 36, 37, 38, 39, 40, 41, 42, 43, 44, 45, 46, 47, 48, 49, 50, 51, 52, 53, 54, 55, 56, 57, 58, 59, 60, 61, 62, 63, 64, 65, 66, 67, 68, 69, 70, 71, 72, 73, 74, 75, 76, 77, 78, 79, 80, 81, 82, 83, 84, 85, 86, 87, 88, 89, 90, 91, 92, 93, 94, 95, 96, 97, 98, 99, 100, 101, 102, 103, 104, 105, 106, 107, 108, 109, 110, 111, 112, 113, 114, 115, 116, 117, 118, 119, 120, 121, 122, 123, 124, 125, 126, 127, 128, 129, 130, 131, 132, 133, 134, 135, 136, 137, 138, 139, 140, 141, 142, 143, 144, 145, 146, 147, 148, 149, 150, 151, 152, 153, 154, 155, 156, 157, 158, 159, 160, 161, 162, 163, 164, 165, 166, 167, 168, 169, 170, 171, 172, 173, 174, 175, 176, 177, 178, 179, 180, 181, 182, 183, 184, 185, 186, 187, 188, 189, 190, 191, 192, 193, 194, 195, 196, 197, 198, 199, 200, 201, 202, 203, 204, 205, 206, 207, 208, 209, 210, 211, 212, 213, 214, 215, 216, 217, 218, 219, 220, 221, 222, 223, 224, 225, 226, 227, 228, 229, 230, 231, 232, 233, 234, 235, 236, 237, 238, 239, 240, 241, 242, 243, 244, 245, 246, 247, 248, 249, 250, 251, 252, 253, 254, 255, 256, 257, 258, 259, 260, 261, 262, 263, 264, 265, 266, 267, 268, 269, 270, 271, 272, 273, 274, 275, 276, 277, 278, 279, 280, 281, 282, 283, 284, 285, 286, 287, 288, 289, 290, 291, 292, 293, 294, 295, 296, 297, 298, 299, 300, 301, 312, or 313, a variant, derivative, orthologue, paralogue or homologue thereof, in which:

[0418] the amino acid at Mutated site 1 is Tyr, and the amino acid at Mutated site 5 is Leu.

[0419] In another preferred embodiment, the mutated PPO comprises a sequence of SEQ ID NO: 1, 2, 3, 4, 5, 6, 7, 8, 9, 10, 11, 12, 13, 14, 15, 16, 17, 18, 19, 20, 21, 22, 23, 24, 25, 26, 27, 28, 29, 30, 31, 32, 33, 34, 35, 36, 37, 38, 39, 40, 41, 42, 43, 44, 45, 46, 47, 48, 49, 50, 51, 52, 53, 54, 55, 56, 57, 58, 59, 60, 61, 62, 63, 64, 65, 66, 67, 68, 69, 70, 71, 72, 73, 74, 75, 76, 77, 78, 79, 80, 81, 82, 83, 84, 85, 86, 87, 88, 89, 90, 91, 92, 93, 94, 95, 96, 97, 98, 99, 100, 101, 102, 103, 104, 105, 106, 107, 108, 109, 110, 111, 112, 113, 114, 115, 116, 117, 118, 119, 120, 121, 122, 123, 124, 125, 126, 127, 128, 129, 130, 131, 132, 133, 134, 135, 136, 137, 138, 139, 140, 141, 142, 143, 144, 145, 146, 147, 148, 149, 150, 151, 152, 153, 154, 155, 156, 157, 158, 159, 160, 161, 162, 163, 164, 165, 166, 167, 168, 169, 170, 171, 172, 173, 174, 175, 176, 177, 178, 179, 180, 181, 182, 183, 184, 185, 186, 187, 188, 189, 190, 191, 192, 193, 194, 195, 196, 197, 198, 199, 200, 201, 202, 203, 204, 205, 206, 207, 208, 209, 210, 211, 212, 213, 214, 215, 216, 217, 218, 219, 220, 221, 222, 223, 224, 225, 226, 227, 228, 229, 230, 231, 232, 233, 234, 235, 236, 237, 238, 239, 240, 241, 242, 243, 244, 245, 246, 247, 248, 249, 250, 251, 252, 253, 254, 255, 256, 257, 258, 259, 260, 261, 262, 263, 264, 265, 266, 267, 268, 269, 270, 271, 272, 273, 274, 275, 276, 277, 278, 279, 280, 281, 282, 283, 284, 285, 286, 287, 288, 289, 290, 291, 292, 293, 294, 295, 296, 297, 298, 299, 300, 301, 312, or 313, a variant, derivative, orthologue, paralogue or homologue thereof, in which:

[0420] the amino acid at Mutated site 1 is Tyr, and the amino acid at Mutated site 5 is Val.

[0421] In another preferred embodiment, the mutated PPO comprises a sequence of SEQ ID NO: 1, 2, 3, 4, 5, 6, 7, 8, 9, 10, 11, 12, 13, 14, 15, 16, 17, 18, 19, 20, 21, 22, 23, 24, 25, 26, 27, 28, 29, 30, 31, 32, 33, 34, 35, 36, 37, 38, 39, 40, 41, 42, 43, 44, 45, 46, 47, 48, 49, 50, 51, 52, 53, 54, 55, 56, 57, 58, 59, 60, 61, 62, 63, 64, 65, 66, 67, 68, 69, 70, 71, 72, 73, 74, 75, 76, 77, 78, 79, 80, 81, 82, 83, 84, 85, 86, 87, 88, 89, 90, 91, 92, 93, 94, 95, 96, 97, 98, 99, 100, 101, 102, 103, 104, 105, 106, 107, 108, 109, 110, 111, 112, 113, 114, 115, 116, 117, 118, 119, 120, 121, 122, 123, 124, 125, 126, 127, 128, 129, 130, 131, 132, 133, 134, 135, 136, 137, 138, 139, 140, 141, 142, 143, 144, 145, 146, 147, 148, 149, 150, 151, 152, 153, 154, 155, 156, 157, 158, 159, 160, 161, 162, 163, 164, 165, 166, 167, 168, 169, 170, 171, 172, 173, 174, 175, 176, 177, 178, 179, 180, 181, 182, 183, 184, 185, 186, 187, 188, 189, 190, 191, 192, 193, 194, 195, 196, 197, 198, 199, 200, 201, 202, 203, 204, 205, 206, 207, 208, 209, 210, 211, 212, 213, 214, 215, 216, 217, 218, 219, 220, 221, 222, 223, 224, 225, 226, 227, 228, 229, 230, 231, 232, 233, 234, 235, 236, 237, 238, 239, 240, 241, 242, 243, 244, 245, 246, 247, 248, 249, 250, 251, 252, 253, 254, 255, 256, 257, 258, 259, 260, 261, 262, 263, 264, 265, 266, 267, 268, 269, 270, 271, 272, 273, 274, 275, 276, 277, 278, 279, 280, 281, 282, 283, 284, 285, 286, 287, 288, 289, 290, 291, 292, 293, 294, 295, 296, 297, 298, 299, 300, 301, 312, or 313, a variant, derivative, orthologue, paralogue or homologue thereof, in which:

[0422] the amino acid at Mutated site 1 is Tyr, and the amino acid at Mutated site 5 is Ile.

[0423] In another preferred embodiment, the mutated PPO comprises a sequence of SEQ ID NO: 1, 2, 3, 4, 5, 6, 7, 8, 9, 10, 11, 12, 13, 14, 15, 16, 17, 18, 19, 20, 21, 22, 23, 24, 25, 26, 27, 28, 29, 30, 31, 32, 33, 34, 35, 36, 37, 38, 39, 40, 41, 42, 43, 44, 45, 46, 47, 48, 49, 50, 51, 52, 53, 54, 55, 56, 57, 58, 59, 60, 61, 62, 63, 64, 65, 66, 67, 68, 69, 70, 71, 72, 73, 74, 75, 76, 77, 78, 79, 80, 81, 82, 83, 84, 85, 86, 87, 88, 89, 90, 91, 92, 93, 94, 95, 96, 97, 98, 99, 100, 101, 102, 103, 104, 105, 106, 107, 108, 109, 110, 111, 112, 113, 114, 115, 116, 117, 118, 119, 120, 121, 122, 123, 124, 125, 126, 127, 128, 129, 130, 131, 132, 133, 134, 135, 136, 137, 138, 139, 140, 141, 142, 143, 144, 145, 146, 147, 148, 149, 150, 151, 152, 153, 154, 155, 156, 157, 158, 159, 160, 161, 162, 163, 164, 165, 166, 167, 168, 169, 170, 171, 172, 173, 174, 175, 176, 177, 178, 179, 180, 181, 182, 183, 184, 185, 186, 187, 188, 189, 190, 191, 192, 193, 194, 195, 196, 197, 198, 199, 200, 201, 202, 203, 204, 205, 206, 207, 208, 209, 210, 211, 212, 213, 214, 215, 216, 217, 218, 219, 220, 221, 222, 223, 224, 225, 226, 227, 228, 229, 230, 231, 232, 233, 234, 235, 236, 237, 238, 239, 240, 241, 242, 243, 244, 245, 246, 247, 248, 249, 250, 251, 252, 253, 254, 255, 256, 257, 258, 259, 260, 261, 262, 263, 264, 265, 266, 267, 268, 269, 270, 271, 272, 273, 274, 275, 276, 277, 278, 279, 280, 281, 282, 283, 284, 285, 286, 287, 288, 289, 290, 291, 292, 293, 294, 295, 296, 297, 298, 299, 300, 301, 312, or 313, a variant, derivative, orthologue, paralogue or homologue thereof, in which:

[0424] the amino acid at Mutated site 1 is Tyr, and the amino acid at Mutated site 5 is Met.

[0425] In another preferred embodiment, the mutated PPO comprises a sequence of SEQ ID NO: 1, 2, 3, 4, 5, 6, 7, 8, 9, 10, 11, 12, 13, 14, 15, 16, 17, 18, 19, 20, 21, 22, 23, 24, 25, 26, 27, 28, 29, 30, 31, 32, 33, 34, 35, 36, 37, 38, 39, 40, 41, 42, 43, 44, 45, 46, 47, 48, 49, 50, 51, 52, 53, 54, 55, 56, 57, 58, 59, 60, 61, 62, 63, 64, 65, 66, 67, 68, 69, 70, 71, 72, 73, 74, 75, 76, 77, 78, 79, 80, 81, 82, 83, 84, 85, 86, 87, 88, 89, 90, 91, 92, 93, 94, 95, 96, 97, 98, 99, 100, 101, 102, 103, 104, 105, 106, 107, 108, 109, 110, 111, 112, 113, 114, 115, 116, 117, 118, 119, 120, 121, 122, 123, 124, 125, 126, 127, 128, 129, 130, 131, 132, 133, 134, 135, 136, 137, 138, 139, 140, 141, 142, 143, 144, 145, 146, 147, 148, 149, 150, 151, 152, 153, 154, 155, 156, 157, 158, 159, 160, 161, 162, 163, 164, 165, 166, 167, 168, 169, 170, 171, 172, 173, 174, 175, 176, 177, 178, 179, 180, 181, 182, 183, 184, 185, 186, 187, 188, 189, 190, 191, 192, 193, 194, 195, 196, 197, 198, 199, 200, 201, 202, 203, 204, 205, 206, 207, 208, 209, 210, 211, 212, 213, 214, 215, 216, 217, 218, 219, 220, 221, 222, 223, 224, 225, 226, 227, 228, 229, 230, 231, 232, 233, 234, 235, 236, 237, 238, 239, 240, 241, 242, 243, 244, 245, 246, 247, 248, 249, 250, 251, 252, 253, 254, 255, 256, 257, 258, 259, 260, 261, 262, 263, 264, 265, 266, 267, 268, 269, 270, 271, 272, 273, 274, 275, 276, 277, 278, 279, 280, 281, 282, 283, 284, 285, 286, 287, 288, 289, 290, 291, 292, 293, 294, 295, 296, 297, 298, 299, 300, 301, 312, or 313, a variant, derivative, orthologue, paralogue or homologue thereof, in which:

[0426] the amino acid at Mutated site 1 is Gly, and the amino acid at Mutated site 5 is Ala.

[0427] In another preferred embodiment, the mutated PPO comprises a sequence of SEQ ID NO: 1, 2, 3, 4, 5, 6, 7, 8, 9, 10, 11, 12, 13, 14, 15, 16, 17, 18, 19, 20, 21, 22, 23, 24, 25, 26, 27, 28, 29, 30, 31, 32, 33, 34, 35, 36, 37, 38, 39, 40, 41, 42, 43, 44, 45, 46, 47, 48, 49, 50, 51, 52, 53, 54, 55, 56, 57, 58, 59, 60, 61, 62, 63, 64, 65, 66, 67, 68, 69, 70, 71, 72, 73, 74, 75, 76, 77, 78, 79, 80, 81, 82, 83, 84, 85, 86, 87, 88, 89, 90, 91, 92, 93, 94, 95, 96, 97, 98, 99, 100, 101, 102, 103, 104, 105, 106, 107, 108, 109, 110, 111, 112, 113, 114, 115, 116, 117, 118, 119, 120, 121, 122, 123, 124, 125, 126, 127, 128, 129, 130, 131, 132, 133, 134, 135, 136, 137, 138, 139, 140, 141, 142, 143, 144, 145, 146, 147, 148, 149, 150, 151, 152, 153, 154, 155, 156, 157, 158, 159, 160, 161, 162, 163, 164, 165, 166, 167, 168, 169, 170, 171, 172, 173, 174, 175, 176, 177, 178, 179, 180, 181, 182, 183, 184, 185, 186, 187, 188, 189, 190, 191, 192, 193, 194, 195, 196, 197, 198, 199, 200, 201, 202, 203, 204, 205, 206, 207, 208, 209, 210, 211, 212, 213, 214, 215, 216, 217, 218, 219, 220, 221, 222, 223, 224, 225, 226, 227, 228, 229, 230, 231, 232, 233, 234, 235, 236, 237, 238, 239, 240, 241, 242, 243, 244, 245, 246, 247, 248, 249, 250, 251, 252, 253, 254, 255, 256, 257, 258, 259, 260, 261, 262, 263, 264, 265, 266, 267, 268, 269, 270, 271, 272, 273, 274, 275, 276, 277, 278, 279, 280, 281, 282, 283, 284, 285, 286, 287, 288, 289, 290, 291, 292, 293, 294, 295, 296, 297, 298, 299, 300, 301, 312, or 313, a variant, derivative, orthologue, paralogue or homologue thereof, in which:

[0428] the amino acid at Mutated site 1 is Gly, and the amino acid at Mutated site 5 is Leu.

[0429] In another preferred embodiment, the mutated PPO comprises a sequence of SEQ ID NO: 1, 2, 3, 4, 5, 6, 7, 8, 9, 10, 11, 12, 13, 14, 15, 16, 17, 18, 19, 20, 21, 22, 23, 24, 25, 26, 27, 28, 29, 30, 31, 32, 33, 34, 35, 36, 37, 38, 39, 40, 41, 42, 43, 44, 45, 46, 47, 48, 49, 50, 51, 52, 53, 54, 55, 56, 57, 58, 59, 60, 61, 62, 63, 64, 65, 66, 67, 68, 69, 70, 71, 72, 73, 74, 75, 76, 77, 78, 79, 80, 81, 82, 83, 84, 85, 86, 87, 88, 89, 90, 91, 92, 93, 94, 95, 96, 97, 98, 99, 100, 101, 102, 103, 104, 105, 106, 107, 108, 109, 110, 111, 112, 113, 114, 115, 116, 117, 118, 119, 120, 121, 122, 123, 124, 125, 126, 127, 128, 129, 130, 131, 132, 133, 134, 135, 136, 137, 138, 139, 140, 141, 142, 143, 144, 145, 146, 147, 148, 149, 150, 151, 152, 153, 154, 155, 156, 157, 158, 159, 160, 161, 162, 163, 164, 165, 166, 167, 168, 169, 170, 171, 172, 173, 174, 175, 176, 177, 178, 179, 180, 181, 182, 183, 184, 185, 186, 187, 188, 189, 190, 191, 192, 193, 194, 195, 196, 197, 198, 199, 200, 201, 202, 203, 204, 205, 206, 207, 208, 209, 210, 211, 212, 213, 214, 215, 216, 217, 218, 219, 220, 221, 222, 223, 224, 225, 226, 227, 228, 229, 230, 231, 232, 233, 234, 235, 236, 237, 238, 239, 240, 241, 242, 243, 244, 245, 246, 247, 248, 249, 250, 251, 252, 253, 254, 255, 256, 257, 258, 259, 260, 261, 262, 263, 264, 265, 266, 267, 268, 269, 270, 271, 272, 273, 274, 275, 276, 277, 278, 279, 280, 281, 282, 283, 284, 285, 286, 287, 288, 289, 290, 291, 292, 293, 294, 295, 296, 297, 298, 299, 300, 301, 312, or 313, a variant, derivative, orthologue, paralogue or homologue thereof, in which:

[0430] the amino acid at Mutated site 1 is Gly, and the amino acid at Mutated site 5 is Val.

[0431] In another preferred embodiment, the mutated PPO comprises a sequence of SEQ ID NO: 1, 2, 3, 4, 5, 6, 7, 8, 9, 10, 11, 12, 13, 14, 15, 16, 17, 18, 19, 20, 21, 22, 23, 24, 25, 26, 27, 28, 29, 30, 31, 32, 33, 34, 35, 36, 37, 38, 39, 40, 41, 42, 43, 44, 45, 46, 47, 48, 49, 50, 51, 52, 53, 54, 55, 56, 57, 58, 59, 60, 61, 62, 63, 64, 65, 66, 67, 68, 69, 70, 71, 72, 73, 74, 75, 76, 77, 78, 79, 80, 81, 82, 83, 84, 85, 86, 87, 88, 89, 90, 91, 92, 93, 94, 95, 96, 97, 98, 99, 100, 101, 102, 103, 104, 105, 106, 107, 108, 109, 110, 111, 112, 113, 114, 115, 116, 117, 118, 119, 120, 121, 122, 123, 124, 125, 126, 127, 128, 129, 130, 131, 132, 133, 134, 135, 136, 137, 138, 139, 140, 141, 142, 143, 144, 145, 146, 147, 148, 149, 150, 151, 152, 153, 154, 155, 156, 157, 158, 159, 160, 161, 162, 163, 164, 165, 166, 167, 168, 169, 170, 171, 172, 173, 174, 175, 176, 177, 178, 179, 180, 181, 182, 183, 184, 185, 186, 187, 188, 189, 190, 191, 192, 193, 194, 195, 196, 197, 198, 199, 200, 201, 202, 203, 204, 205, 206, 207, 208, 209, 210, 211, 212, 213, 214, 215, 216, 217, 218, 219, 220, 221, 222, 223, 224, 225, 226, 227, 228, 229, 230, 231, 232, 233, 234, 235, 236, 237, 238, 239, 240, 241, 242, 243, 244, 245, 246, 247, 248, 249, 250, 251, 252, 253, 254, 255, 256, 257, 258, 259, 260, 261, 262, 263, 264, 265, 266, 267, 268, 269, 270, 271, 272, 273, 274, 275, 276, 277, 278, 279, 280, 281, 282, 283, 284, 285, 286, 287, 288, 289, 290, 291, 292, 293, 294, 295, 296, 297, 298, 299, 300, 301, 312, or 313, a variant, derivative, orthologue, paralogue or homologue thereof, in which:

[0432] the amino acid at Mutated site 1 is Gly, and the amino acid at Mutated site 5 is Ile.

[0433] In another preferred embodiment, the mutated PPO comprises a sequence of SEQ ID NO: 1, 2, 3, 4, 5, 6, 7, 8, 9, 10, 11, 12, 13, 14, 15, 16, 17, 18, 19, 20, 21, 22, 23, 24, 25, 26, 27, 28, 29, 30, 31, 32, 33, 34, 35, 36, 37, 38, 39, 40, 41, 42, 43, 44, 45, 46, 47, 48, 49, 50, 51, 52, 53, 54, 55, 56, 57, 58, 59, 60, 61, 62, 63, 64, 65, 66, 67, 68, 69, 70, 71, 72, 73, 74, 75, 76, 77, 78, 79, 80, 81, 82, 83, 84, 85, 86, 87, 88, 89, 90, 91, 92, 93, 94, 95, 96, 97, 98, 99, 100, 101, 102, 103, 104, 105, 106, 107, 108, 109, 110, 111, 112, 113, 114, 115, 116, 117, 118, 119, 120, 121, 122, 123, 124, 125, 126, 127, 128, 129, 130, 131, 132, 133, 134, 135, 136, 137, 138, 139, 140, 141, 142, 143, 144, 145, 146, 147, 148, 149, 150, 151, 152, 153, 154, 155, 156, 157, 158, 159, 160, 161, 162, 163, 164, 165, 166, 167, 168, 169, 170, 171, 172, 173, 174, 175, 176, 177, 178, 179, 180, 181, 182, 183, 184, 185, 186, 187, 188, 189, 190, 191, 192, 193, 194, 195, 196, 197, 198, 199, 200, 201, 202, 203, 204, 205, 206, 207, 208, 209, 210, 211, 212, 213, 214, 215, 216, 217, 218, 219, 220, 221, 222, 223, 224, 225, 226, 227, 228, 229, 230, 231, 232, 233, 234, 235, 236, 237, 238, 239, 240, 241, 242, 243, 244, 245, 246, 247, 248, 249, 250, 251, 252, 253, 254, 255, 256, 257, 258, 259, 260, 261, 262, 263, 264, 265, 266, 267, 268, 269, 270, 271, 272, 273, 274, 275, 276, 277, 278, 279, 280, 281, 282, 283, 284, 285, 286, 287, 288, 289, 290, 291, 292, 293, 294, 295, 296, 297, 298, 299, 300, 301, 312, or 313, a variant, derivative, orthologue, paralogue or homologue thereof, in which:

[0434] the amino acid at Mutated site 1 is Gly, and the amino acid at Mutated site 5 is Met.

[0435] In another preferred embodiment, the mutated PPO comprises a sequence of SEQ ID NO: 1, 2, 3, 4, 5, 6, 7, 8, 9, 10, 11, 12, 13, 14, 15, 16, 17, 18, 19, 20, 21, 22, 23, 24, 25, 26, 27, 28, 29, 30, 31, 32, 33, 34, 35, 36, 37, 38, 39, 40, 41, 42, 43, 44, 45, 46, 47, 48, 49, 50, 51, 52, 53, 54, 55, 56, 57, 58, 59, 60, 61, 62, 63, 64, 65, 66, 67, 68, 69, 70, 71, 72, 73, 74, 75, 76, 77, 78, 79, 80, 81, 82, 83, 84, 85, 86, 87, 88, 89, 90, 91, 92, 93, 94, 95, 96, 97, 98, 99, 100, 101, 102, 103, 104, 105, 106, 107, 108, 109, 110, 111, 112, 113, 114, 115, 116, 117, 118, 119, 120, 121, 122, 123, 124, 125, 126, 127, 128, 129, 130, 131, 132, 133, 134, 135, 136, 137, 138, 139, 140, 141, 142, 143, 144, 145, 146, 147, 148, 149, 150, 151, 152, 153, 154, 155, 156, 157, 158, 159, 160, 161, 162, 163, 164, 165, 166, 167, 168, 169, 170, 171, 172, 173, 174, 175, 176, 177, 178, 179, 180, 181, 182, 183, 184, 185, 186, 187, 188, 189, 190, 191, 192, 193, 194, 195, 196, 197, 198, 199, 200, 201, 202, 203, 204, 205, 206, 207, 208, 209, 210, 211, 212, 213, 214, 215, 216, 217, 218, 219, 220, 221, 222, 223, 224, 225, 226, 227, 228, 229, 230, 231, 232, 233, 234, 235, 236, 237, 238, 239, 240, 241, 242, 243, 244, 245, 246, 247, 248, 249, 250, 251, 252, 253, 254, 255, 256, 257, 258, 259, 260, 261, 262, 263, 264, 265, 266, 267, 268, 269, 270, 271, 272, 273, 274, 275, 276, 277, 278, 279, 280, 281, 282, 283, 284, 285, 286, 287, 288, 289, 290, 291, 292, 293, 294, 295, 296, 297, 298, 299, 300, 301, 312, or 313, a variant, derivative, orthologue, paralogue or homologue thereof, in which:

[0436] the amino acid at Mutated site 1 is Asn, and the amino acid at Mutated site 5 is Ala.

[0437] In another preferred embodiment, the mutated PPO comprises a sequence of SEQ ID NO: 1, 2, 3, 4, 5, 6, 7, 8, 9, 10, 11, 12, 13, 14, 15, 16, 17, 18, 19, 20, 21, 22, 23, 24, 25, 26, 27, 28, 29, 30, 31, 32, 33, 34, 35, 36, 37, 38, 39, 40, 41, 42, 43, 44, 45, 46, 47, 48, 49, 50, 51, 52, 53, 54, 55, 56, 57, 58, 59, 60, 61, 62, 63, 64, 65, 66, 67, 68, 69, 70, 71, 72, 73, 74, 75, 76, 77, 78, 79, 80, 81, 82, 83, 84, 85, 86, 87, 88, 89, 90, 91, 92, 93, 94, 95, 96, 97, 98, 99, 100, 101, 102, 103, 104, 105, 106, 107, 108, 109, 110, 111, 112, 113, 114, 115, 116, 117, 118, 119, 120, 121, 122, 123, 124, 125, 126, 127, 128, 129, 130, 131, 132, 133, 134, 135, 136, 137, 138, 139, 140, 141, 142, 143, 144, 145, 146, 147, 148, 149, 150, 151, 152, 153, 154, 155, 156, 157, 158, 159, 160, 161, 162, 163, 164, 165, 166, 167, 168, 169, 170, 171, 172, 173, 174, 175, 176, 177, 178, 179, 180, 181, 182, 183, 184, 185, 186, 187, 188, 189, 190, 191, 192, 193, 194, 195, 196, 197, 198, 199, 200, 201, 202, 203, 204, 205, 206, 207, 208, 209, 210, 211, 212, 213, 214, 215, 216, 217, 218, 219, 220, 221, 222, 223, 224, 225, 226, 227, 228, 229, 230, 231, 232, 233, 234, 235, 236, 237, 238, 239, 240, 241, 242, 243, 244, 245, 246, 247, 248, 249, 250, 251, 252, 253, 254, 255, 256, 257, 258, 259, 260, 261, 262, 263, 264, 265, 266, 267, 268, 269, 270, 271, 272, 273, 274, 275, 276, 277, 278, 279, 280, 281, 282, 283, 284, 285, 286, 287, 288, 289, 290, 291, 292, 293, 294, 295, 296, 297, 298, 299, 300, 301, 312, or 313, a variant, derivative, orthologue, paralogue or homologue thereof, in which:

[0438] the amino acid at Mutated site 1 is Asn, and the amino acid at Mutated site 5 is Leu.

[0439] In another preferred embodiment, the mutated PPO comprises a sequence of SEQ ID NO: 1, 2, 3, 4, 5, 6, 7, 8, 9, 10, 11, 12, 13, 14, 15, 16, 17, 18, 19, 20, 21, 22, 23, 24, 25, 26, 27, 28, 29, 30, 31, 32, 33, 34, 35, 36, 37, 38, 39, 40, 41, 42, 43, 44, 45, 46, 47, 48, 49, 50, 51, 52, 53, 54, 55, 56, 57, 58, 59, 60, 61, 62, 63, 64, 65, 66, 67, 68, 69, 70, 71, 72, 73, 74, 75, 76, 77, 78, 79, 80, 81, 82, 83, 84, 85, 86, 87, 88, 89, 90, 91, 92, 93, 94, 95, 96, 97, 98, 99, 100, 101, 102, 103, 104, 105, 106, 107, 108, 109, 110, 111, 112, 113, 114, 115, 116, 117, 118, 119, 120, 121, 122, 123, 124, 125, 126, 127, 128, 129, 130, 131, 132, 133, 134, 135, 136, 137, 138, 139, 140, 141, 142, 143, 144, 145, 146, 147, 148, 149, 150, 151, 152, 153, 154, 155, 156, 157, 158, 159, 160, 161, 162, 163, 164, 165, 166, 167, 168, 169, 170, 171, 172, 173, 174, 175, 176, 177, 178, 179, 180, 181, 182, 183, 184, 185, 186, 187, 188, 189, 190, 191, 192, 193, 194, 195, 196, 197, 198, 199, 200, 201, 202, 203, 204, 205, 206, 207, 208, 209, 210, 211, 212, 213, 214, 215, 216, 217, 218, 219, 220, 221, 222, 223, 224, 225, 226, 227, 228, 229, 230, 231, 232, 233, 234, 235, 236, 237, 238, 239, 240, 241, 242, 243, 244, 245, 246, 247, 248, 249, 250, 251, 252, 253, 254, 255, 256, 257, 258, 259, 260, 261, 262, 263, 264, 265, 266, 267, 268, 269, 270, 271, 272, 273, 274, 275, 276, 277, 278, 279, 280, 281, 282, 283, 284, 285, 286, 287, 288, 289, 290, 291, 292, 293, 294, 295, 296, 297, 298, 299, 300, 301, 312, or 313, a variant, derivative, orthologue, paralogue or homologue thereof, in which:

[0440] the amino acid at Mutated site 1 is Asn, and the amino acid at Mutated site 5 is Val.

[0441] In another preferred embodiment, the mutated PPO comprises a sequence of SEQ ID NO: 1, 2, 3, 4, 5, 6, 7, 8, 9, 10, 11, 12, 13, 14, 15, 16, 17, 18, 19, 20, 21, 22, 23, 24, 25, 26, 27, 28, 29, 30, 31, 32, 33, 34, 35, 36, 37, 38, 39, 40, 41, 42, 43, 44, 45, 46, 47, 48, 49, 50, 51, 52, 53, 54, 55, 56, 57, 58, 59, 60, 61, 62, 63, 64, 65, 66, 67, 68, 69, 70, 71, 72, 73, 74, 75, 76, 77, 78, 79, 80, 81, 82, 83, 84, 85, 86, 87, 88, 89, 90, 91, 92, 93, 94, 95, 96, 97, 98, 99, 100, 101, 102, 103, 104, 105, 106, 107, 108, 109, 110, 111, 112, 113, 114, 115, 116, 117, 118, 119, 120, 121, 122, 123, 124, 125, 126, 127, 128, 129, 130, 131, 132, 133, 134, 135, 136, 137, 138, 139, 140, 141, 142, 143, 144, 145, 146, 147, 148, 149, 150, 151, 152, 153, 154, 155, 156, 157, 158, 159, 160, 161, 162, 163, 164, 165, 166, 167, 168, 169, 170, 171, 172, 173, 174, 175, 176, 177, 178, 179, 180, 181, 182, 183, 184, 185, 186, 187, 188, 189, 190, 191, 192, 193, 194, 195, 196, 197, 198, 199, 200, 201, 202, 203, 204, 205, 206, 207, 208, 209, 210, 211, 212, 213, 214, 215, 216, 217, 218, 219, 220, 221, 222, 223, 224, 225, 226, 227, 228, 229, 230, 231, 232, 233, 234, 235, 236, 237, 238, 239, 240, 241, 242, 243, 244, 245, 246, 247, 248, 249, 250, 251, 252, 253, 254, 255, 256, 257, 258, 259, 260, 261, 262, 263, 264, 265, 266, 267, 268, 269, 270, 271, 272, 273, 274, 275, 276, 277, 278, 279, 280, 281, 282, 283, 284, 285, 286, 287, 288, 289, 290, 291, 292, 293, 294, 295, 296, 297, 298, 299, 300, 301, 312, or 313, a variant, derivative, orthologue, paralogue or homologue thereof, in which:

[0442] the amino acid at Mutated site 1 is Asn, and the amino acid at Mutated site 5 is Ile.

[0443] In another preferred embodiment, the mutated PPO comprises a sequence of SEQ ID NO: 1, 2, 3, 4, 5, 6, 7, 8, 9, 10, 11, 12, 13, 14, 15, 16, 17, 18, 19, 20, 21, 22, 23, 24, 25, 26, 27, 28, 29, 30, 31, 32, 33, 34, 35, 36, 37, 38, 39, 40, 41, 42, 43, 44, 45, 46, 47, 48, 49, 50, 51, 52, 53, 54, 55, 56, 57, 58, 59, 60, 61, 62, 63, 64, 65, 66, 67, 68, 69, 70, 71, 72, 73, 74, 75, 76, 77, 78, 79, 80, 81, 82, 83, 84, 85, 86, 87, 88, 89, 90, 91, 92, 93, 94, 95, 96, 97, 98, 99, 100, 101, 102, 103, 104, 105, 106, 107, 108, 109, 110, 111, 112, 113, 114, 115, 116, 117, 118, 119, 120, 121, 122, 123, 124, 125, 126, 127, 128, 129, 130, 131, 132, 133, 134, 135, 136, 137, 138, 139, 140, 141, 142, 143, 144, 145, 146, 147, 148, 149, 150, 151, 152, 153, 154, 155, 156, 157, 158, 159, 160, 161, 162, 163, 164, 165, 166, 167, 168, 169, 170, 171, 172, 173, 174, 175, 176, 177, 178, 179, 180, 181, 182, 183, 184, 185, 186, 187, 188, 189, 190, 191, 192, 193, 194, 195, 196, 197, 198, 199, 200, 201, 202, 203, 204, 205, 206, 207, 208, 209, 210, 211, 212, 213, 214, 215, 216, 217, 218, 219, 220, 221, 222, 223, 224, 225, 226, 227, 228, 229, 230, 231, 232, 233, 234, 235, 236, 237, 238, 239, 240, 241, 242, 243, 244, 245, 246, 247, 248, 249, 250, 251, 252, 253, 254, 255, 256, 257, 258, 259, 260, 261, 262, 263, 264, 265, 266, 267, 268, 269, 270, 271, 272, 273, 274, 275, 276, 277, 278, 279, 280, 281, 282, 283, 284, 285, 286, 287, 288, 289, 290, 291, 292, 293, 294, 295, 296, 297, 298, 299, 300, 301, 312, or 313, a variant, derivative, orthologue, paralogue or homologue thereof, in which:

[0444] the amino acid at Mutated site 1 is Asn, and the amino acid at Mutated site 5 is Met.

[0445] In another preferred embodiment, the mutated PPO comprises a sequence of SEQ ID NO: 1, 2, 3, 4, 5, 6, 7, 8, 9, 10, 11, 12, 13, 14, 15, 16, 17, 18, 19, 20, 21, 22, 23, 24, 25, 26, 27, 28, 29, 30, 31, 32, 33, 34, 35, 36, 37, 38, 39, 40, 41, 42, 43, 44, 45, 46, 47, 48, 49, 50, 51, 52, 53, 54, 55, 56, 57, 58, 59, 60, 61, 62, 63, 64, 65, 66, 67, 68, 69, 70, 71, 72, 73, 74, 75, 76, 77, 78, 79, 80, 81, 82, 83, 84, 85, 86, 87, 88, 89, 90, 91, 92, 93, 94, 95, 96, 97, 98, 99, 100, 101, 102, 103, 104, 105, 106, 107, 108, 109, 110, 111, 112, 113, 114, 115, 116, 117, 118, 119, 120, 121, 122, 123, 124, 125, 126, 127, 128, 129, 130, 131, 132, 133, 134, 135, 136, 137, 138, 139, 140, 141, 142, 143, 144, 145, 146, 147, 148, 149, 150, 151, 152, 153, 154, 155, 156, 157, 158, 159, 160, 161, 162, 163, 164, 165, 166, 167, 168, 169, 170, 171, 172, 173, 174, 175, 176, 177, 178, 179, 180, 181, 182, 183, 184, 185, 186, 187, 188, 189, 190, 191, 192, 193, 194, 195, 196, 197, 198, 199, 200, 201, 202, 203, 204, 205, 206, 207, 208, 209, 210, 211, 212, 213, 214, 215, 216, 217, 218, 219, 220, 221, 222, 223, 224, 225, 226, 227, 228, 229, 230, 231, 232, 233, 234, 235, 236, 237, 238, 239, 240, 241, 242, 243, 244, 245, 246, 247, 248, 249, 250, 251, 252, 253, 254, 255, 256, 257, 258, 259, 260, 261, 262, 263, 264, 265, 266, 267, 268, 269, 270, 271, 272, 273, 274, 275, 276, 277, 278, 279, 280, 281, 282, 283, 284, 285, 286, 287, 288, 289, 290, 291, 292, 293, 294, 295, 296, 297, 298, 299, 300, 301, 312, or 313, a variant, derivative, orthologue, paralogue or homologue thereof, in which:

[0446] the amino acid at Mutated site 1 is Cys, and the amino acid at Mutated site 5 is Ala.

[0447] In another preferred embodiment, the mutated PPO comprises a sequence of SEQ ID NO: 1, 2, 3, 4, 5, 6, 7, 8, 9, 10, 11, 12, 13, 14, 15, 16, 17, 18, 19, 20, 21, 22, 23, 24, 25, 26, 27, 28, 29, 30, 31, 32, 33, 34, 35, 36, 37, 38, 39, 40, 41, 42, 43, 44, 45, 46, 47, 48, 49, 50, 51, 52, 53, 54, 55, 56, 57, 58, 59, 60, 61, 62, 63, 64, 65, 66, 67, 68, 69, 70, 71, 72, 73, 74, 75, 76, 77, 78, 79, 80, 81, 82, 83, 84, 85, 86, 87, 88, 89, 90, 91, 92, 93, 94, 95, 96, 97, 98, 99, 100, 101, 102, 103, 104, 105, 106, 107, 108, 109, 110, 111, 112, 113, 114, 115, 116, 117, 118, 119, 120, 121, 122, 123, 124, 125, 126, 127, 128, 129, 130, 131, 132, 133, 134, 135, 136, 137, 138, 139, 140, 141, 142, 143, 144, 145, 146, 147, 148, 149, 150, 151, 152, 153, 154, 155, 156, 157, 158, 159, 160, 161, 162, 163, 164, 165, 166, 167, 168, 169, 170, 171, 172, 173, 174, 175, 176, 177, 178, 179, 180, 181, 182, 183, 184, 185, 186, 187, 188, 189, 190, 191, 192, 193, 194, 195, 196, 197, 198, 199, 200, 201, 202, 203, 204, 205, 206, 207, 208, 209, 210, 211, 212, 213, 214, 215, 216, 217, 218, 219, 220, 221, 222, 223, 224, 225, 226, 227, 228, 229, 230, 231, 232, 233, 234, 235, 236, 237, 238, 239, 240, 241, 242, 243, 244, 245, 246, 247, 248, 249, 250, 251, 252, 253, 254, 255, 256, 257, 258, 259, 260, 261, 262, 263, 264, 265, 266, 267, 268, 269, 270, 271, 272, 273, 274, 275, 276, 277, 278, 279, 280, 281, 282, 283, 284, 285, 286, 287, 288, 289, 290, 291, 292, 293, 294, 295, 296, 297, 298, 299, 300, 301, 312, or 313, a variant, derivative, orthologue, paralogue or homologue thereof, in which:

[0448] the amino acid at Mutated site 1 is Cys, and the amino acid at Mutated site 5 is Leu.

[0449] In another preferred embodiment, the mutated PPO comprises a sequence of SEQ ID NO: 1, 2, 3, 4, 5, 6, 7, 8, 9, 10, 11, 12, 13, 14, 15, 16, 17, 18, 19, 20, 21, 22, 23, 24, 25, 26, 27, 28, 29, 30, 31, 32, 33, 34, 35, 36, 37, 38, 39, 40, 41, 42, 43, 44, 45, 46, 47, 48, 49, 50, 51, 52, 53, 54, 55, 56, 57, 58, 59, 60, 61, 62, 63, 64, 65, 66, 67, 68, 69, 70, 71, 72, 73, 74, 75, 76, 77, 78, 79, 80, 81, 82, 83, 84, 85, 86, 87, 88, 89, 90, 91, 92, 93, 94, 95, 96, 97, 98, 99, 100, 101, 102, 103, 104, 105, 106, 107, 108, 109, 110, 111, 112, 113, 114, 115, 116, 117, 118, 119, 120, 121, 122, 123, 124, 125, 126, 127, 128, 129, 130, 131, 132, 133, 134, 135, 136, 137, 138, 139, 140, 141, 142, 143, 144, 145, 146, 147, 148, 149, 150, 151, 152, 153, 154, 155, 156, 157, 158, 159, 160, 161, 162, 163, 164, 165, 166, 167, 168, 169, 170, 171, 172, 173, 174, 175, 176, 177, 178, 179, 180, 181, 182, 183, 184, 185, 186, 187, 188, 189, 190, 191, 192, 193, 194, 195, 196, 197, 198, 199, 200, 201, 202, 203, 204, 205, 206, 207, 208, 209, 210, 211, 212, 213, 214, 215, 216, 217, 218, 219, 220, 221, 222, 223, 224, 225, 226, 227, 228, 229, 230, 231, 232, 233, 234, 235, 236, 237, 238, 239, 240, 241, 242, 243, 244, 245, 246, 247, 248, 249, 250, 251, 252, 253, 254, 255, 256, 257, 258, 259, 260, 261, 262, 263, 264, 265, 266, 267, 268, 269, 270, 271, 272, 273, 274, 275, 276, 277, 278, 279, 280, 281, 282, 283, 284, 285, 286, 287, 288, 289, 290, 291, 292, 293, 294, 295, 296, 297, 298, 299, 300, 301, 312, or 313, a variant, derivative, orthologue, paralogue or homologue thereof, in which:

[0450] the amino acid at Mutated site 1 is Cys, and the amino acid at Mutated site 5 is Val.

[0451] In another preferred embodiment, the mutated PPO comprises a sequence of SEQ ID NO: 1, 2, 3, 4, 5, 6, 7, 8, 9, 10, 11, 12, 13, 14, 15, 16, 17, 18, 19, 20, 21, 22, 23, 24, 25, 26, 27, 28, 29, 30, 31, 32, 33, 34, 35, 36, 37, 38, 39, 40, 41, 42, 43, 44, 45, 46, 47, 48, 49, 50, 51, 52, 53, 54, 55, 56, 57, 58, 59, 60, 61, 62, 63, 64, 65, 66, 67, 68, 69, 70, 71, 72, 73, 74, 75, 76, 77, 78, 79, 80, 81, 82, 83, 84, 85, 86, 87, 88, 89, 90, 91, 92, 93, 94, 95, 96, 97, 98, 99, 100, 101, 102, 103, 104, 105, 106, 107, 108, 109, 110, 111, 112, 113, 114, 115, 116, 117, 118, 119, 120, 121, 122, 123, 124, 125, 126, 127, 128, 129, 130, 131, 132, 133, 134, 135, 136, 137, 138, 139, 140, 141, 142, 143, 144, 145, 146, 147, 148, 149, 150, 151, 152, 153, 154, 155, 156, 157, 158, 159, 160, 161, 162, 163, 164, 165, 166, 167, 168, 169, 170, 171, 172, 173, 174, 175, 176, 177, 178, 179, 180, 181, 182, 183, 184, 185, 186, 187, 188, 189, 190, 191, 192, 193, 194, 195, 196, 197, 198, 199, 200, 201, 202, 203, 204, 205, 206, 207, 208, 209, 210, 211, 212, 213, 214, 215, 216, 217, 218, 219, 220, 221, 222, 223, 224, 225, 226, 227, 228, 229, 230, 231, 232, 233, 234, 235, 236, 237, 238, 239, 240, 241, 242, 243, 244, 245, 246, 247, 248, 249, 250, 251, 252, 253, 254, 255, 256, 257, 258, 259, 260, 261, 262, 263, 264, 265, 266, 267, 268, 269, 270, 271, 272, 273, 274, 275, 276, 277, 278, 279, 280, 281, 282, 283, 284, 285, 286, 287, 288, 289, 290, 291, 292, 293, 294, 295, 296, 297, 298, 299, 300, 301, 312, or 313, a variant, derivative, orthologue, paralogue or homologue thereof, in which:

[0452] the amino acid at Mutated site 1 is Cys, and the amino acid at Mutated site 5 is Ile.

[0453] In another preferred embodiment, the mutated PPO comprises a sequence of SEQ ID NO: 1, 2, 3, 4, 5, 6, 7, 8, 9, 10, 11, 12, 13, 14, 15, 16, 17, 18, 19, 20, 21, 22, 23, 24, 25, 26, 27, 28, 29, 30, 31, 32, 33, 34, 35, 36, 37, 38, 39, 40, 41, 42, 43, 44, 45, 46, 47, 48, 49, 50, 51, 52, 53, 54, 55, 56, 57, 58, 59, 60, 61, 62, 63, 64, 65, 66, 67, 68, 69, 70, 71, 72, 73, 74, 75, 76, 77, 78, 79, 80, 81, 82, 83, 84, 85, 86, 87, 88, 89, 90, 91, 92, 93, 94, 95, 96, 97, 98, 99, 100, 101, 102, 103, 104, 105, 106, 107, 108, 109, 110, 111, 112, 113, 114, 115, 116, 117, 118, 119, 120, 121, 122, 123, 124, 125, 126, 127, 128, 129, 130, 131, 132, 133, 134, 135, 136, 137, 138, 139, 140, 141, 142, 143, 144, 145, 146, 147, 148, 149, 150, 151, 152, 153, 154, 155, 156, 157, 158, 159, 160, 161, 162, 163, 164, 165, 166, 167, 168, 169, 170, 171, 172, 173, 174, 175, 176, 177, 178, 179, 180, 181, 182, 183, 184, 185, 186, 187, 188, 189, 190, 191, 192, 193, 194, 195, 196, 197, 198, 199, 200, 201, 202, 203, 204, 205, 206, 207, 208, 209, 210, 211, 212, 213, 214, 215, 216, 217, 218, 219, 220, 221, 222, 223, 224, 225, 226, 227, 228, 229, 230, 231, 232, 233, 234, 235, 236, 237, 238, 239, 240, 241, 242, 243, 244, 245, 246, 247, 248, 249, 250, 251, 252, 253, 254, 255, 256, 257, 258, 259, 260, 261, 262, 263, 264, 265, 266, 267, 268, 269, 270, 271, 272, 273, 274, 275, 276, 277, 278, 279, 280, 281, 282, 283, 284, 285, 286, 287, 288, 289, 290, 291, 292, 293, 294, 295, 296, 297, 298, 299, 300, 301, 312, or 313, a variant, derivative, orthologue, paralogue or homologue thereof, in which:

[0454] the amino acid at Mutated site 1 is Cys, and the amino acid at Mutated site 5 is Met.

[0455] In another preferred embodiment, the mutated PPO comprises a sequence of SEQ ID NO: 1, 2, 3, 4, 5, 6, 7, 8, 9, 10, 11, 12, 13, 14, 15, 16, 17, 18, 19, 20, 21, 22, 23, 24, 25, 26, 27, 28, 29, 30, 31, 32, 33, 34, 35, 36, 37, 38, 39, 40, 41, 42, 43, 44, 45, 46, 47, 48, 49, 50, 51, 52, 53, 54, 55, 56, 57, 58, 59, 60, 61, 62, 63, 64, 65, 66, 67, 68, 69, 70, 71, 72, 73, 74, 75, 76, 77, 78, 79, 80, 81, 82, 83, 84, 85, 86, 87, 88, 89, 90, 91, 92, 93, 94, 95, 96, 97, 98, 99, 100, 101, 102, 103, 104, 105, 106, 107, 108, 109, 110, 111, 112, 113, 114, 115, 116, 117, 118, 119, 120, 121, 122, 123, 124, 125, 126, 127, 128, 129, 130, 131, 132, 133, 134, 135, 136, 137, 138, 139, 140, 141, 142, 143, 144, 145, 146, 147, 148, 149, 150, 151, 152, 153, 154, 155, 156, 157, 158, 159, 160, 161, 162, 163, 164, 165, 166, 167, 168, 169, 170, 171, 172, 173, 174, 175, 176, 177, 178, 179, 180, 181, 182, 183, 184, 185, 186, 187, 188, 189, 190, 191, 192, 193, 194, 195, 196, 197, 198, 199, 200, 201, 202, 203, 204, 205, 206, 207, 208, 209, 210, 211, 212, 213, 214, 215, 216, 217, 218, 219, 220, 221, 222, 223, 224, 225, 226, 227, 228, 229, 230, 231, 232, 233, 234, 235, 236, 237, 238, 239, 240, 241, 242, 243, 244, 245, 246, 247, 248, 249, 250, 251, 252, 253, 254, 255, 256, 257, 258, 259, 260, 261, 262, 263, 264, 265, 266, 267, 268, 269, 270, 271, 272, 273, 274, 275, 276, 277, 278, 279, 280, 281, 282, 283, 284, 285, 286, 287, 288, 289, 290, 291, 292, 293, 294, 295, 296, 297, 298, 299, 300, 301, 312, or 313, a variant, derivative, orthologue, paralogue or homologue thereof, in which:

[0456] the amino acid at Mutated site 1 is Phe, and the amino acid at Mutated site 5 is Ala.

[0457] In another preferred embodiment, the mutated PPO comprises a sequence of SEQ ID NO: 1, 2, 3, 4, 5, 6, 7, 8, 9, 10, 11, 12, 13, 14, 15, 16, 17, 18, 19, 20, 21, 22, 23, 24, 25, 26, 27, 28, 29, 30, 31, 32, 33, 34, 35, 36, 37, 38, 39, 40, 41, 42, 43, 44, 45, 46, 47, 48, 49, 50, 51, 52, 53, 54, 55, 56, 57, 58, 59, 60, 61, 62, 63, 64, 65, 66, 67, 68, 69, 70, 71, 72, 73, 74, 75, 76, 77, 78, 79, 80, 81, 82, 83, 84, 85, 86, 87, 88, 89, 90, 91, 92, 93, 94, 95, 96, 97, 98, 99, 100, 101, 102, 103, 104, 105, 106, 107, 108, 109, 110, 111, 112, 113, 114, 115, 116, 117, 118, 119, 120, 121, 122, 123, 124, 125, 126, 127, 128, 129, 130, 131, 132, 133, 134, 135, 136, 137, 138, 139, 140, 141, 142, 143, 144, 145, 146, 147, 148, 149, 150, 151, 152, 153, 154, 155, 156, 157, 158, 159, 160, 161, 162, 163, 164, 165, 166, 167, 168, 169, 170, 171, 172, 173, 174, 175, 176, 177, 178, 179, 180, 181, 182, 183, 184, 185, 186, 187, 188, 189, 190, 191, 192, 193, 194, 195, 196, 197, 198, 199, 200, 201, 202, 203, 204, 205, 206, 207, 208, 209, 210, 211, 212, 213, 214, 215, 216, 217, 218, 219, 220, 221, 222, 223, 224, 225, 226, 227, 228, 229, 230, 231, 232, 233, 234, 235, 236, 237, 238, 239, 240, 241, 242, 243, 244, 245, 246, 247, 248, 249, 250, 251, 252, 253, 254, 255, 256, 257, 258, 259, 260, 261, 262, 263, 264, 265, 266, 267, 268, 269, 270, 271, 272, 273, 274, 275, 276, 277, 278, 279, 280, 281, 282, 283, 284, 285, 286, 287, 288, 289, 290, 291, 292, 293, 294, 295, 296, 297, 298, 299, 300, 301, 312, or 313, a variant, derivative, orthologue, paralogue or homologue thereof, in which:

[0458] the amino acid at Mutated site 1 is Phe, and the amino acid at Mutated site 5 is Leu.

[0459] In another preferred embodiment, the mutated PPO comprises a sequence of SEQ ID NO: 1, 2, 3, 4, 5, 6, 7, 8, 9, 10, 11, 12, 13, 14, 15, 16, 17, 18, 19, 20, 21, 22, 23, 24, 25, 26, 27, 28, 29, 30, 31, 32, 33, 34, 35, 36, 37, 38, 39, 40, 41, 42, 43, 44, 45, 46, 47, 48, 49, 50, 51, 52, 53, 54, 55, 56, 57, 58, 59, 60, 61, 62, 63, 64, 65, 66, 67, 68, 69, 70, 71, 72, 73, 74, 75, 76, 77, 78, 79, 80, 81, 82, 83, 84, 85, 86, 87, 88, 89, 90, 91, 92, 93, 94, 95, 96, 97, 98, 99, 100, 101, 102, 103, 104, 105, 106, 107, 108, 109, 110, 111, 112, 113, 114, 115, 116, 117, 118, 119, 120, 121, 122, 123, 124, 125, 126, 127, 128, 129, 130, 131, 132, 133, 134, 135, 136, 137, 138, 139, 140, 141, 142, 143, 144, 145, 146, 147, 148, 149, 150, 151, 152, 153, 154, 155, 156, 157, 158, 159, 160, 161, 162, 163, 164, 165, 166, 167, 168, 169, 170, 171, 172, 173, 174, 175, 176, 177, 178, 179, 180, 181, 182, 183, 184, 185, 186, 187, 188, 189, 190, 191, 192, 193, 194, 195, 196, 197, 198, 199, 200, 201, 202, 203, 204, 205, 206, 207, 208, 209, 210, 211, 212, 213, 214, 215, 216, 217, 218, 219, 220, 221, 222, 223, 224, 225, 226, 227, 228, 229, 230, 231, 232, 233, 234, 235, 236, 237, 238, 239, 240, 241, 242, 243, 244, 245, 246, 247, 248, 249, 250, 251, 252, 253, 254, 255, 256, 257, 258, 259, 260, 261, 262, 263, 264, 265, 266, 267, 268, 269, 270, 271, 272, 273, 274, 275, 276, 277, 278, 279, 280, 281, 282, 283, 284, 285, 286, 287, 288, 289, 290, 291, 292, 293, 294, 295, 296, 297, 298, 299, 300, 301, 312, or 313, a variant, derivative, orthologue, paralogue or homologue thereof, in which:

[0460] the amino acid at Mutated site 1 is Phe, and the amino acid at Mutated site 5 is Val.

[0461] In another preferred embodiment, the mutated PPO comprises a sequence of SEQ ID NO: 1, 2, 3, 4, 5, 6, 7, 8, 9, 10, 11, 12, 13, 14, 15, 16, 17, 18, 19, 20, 21, 22, 23, 24, 25, 26, 27, 28, 29, 30, 31, 32, 33, 34, 35, 36, 37, 38, 39, 40, 41, 42, 43, 44, 45, 46, 47, 48, 49, 50, 51, 52, 53, 54, 55, 56, 57, 58, 59, 60, 61, 62, 63, 64, 65, 66, 67, 68, 69, 70, 71, 72, 73, 74, 75, 76, 77, 78, 79, 80, 81, 82, 83, 84, 85, 86, 87, 88, 89, 90, 91, 92, 93, 94, 95, 96, 97, 98, 99, 100, 101, 102, 103, 104, 105, 106, 107, 108, 109, 110, 111, 112, 113, 114, 115, 116, 117, 118, 119, 120, 121, 122, 123, 124, 125, 126, 127, 128, 129, 130, 131, 132, 133, 134, 135, 136, 137, 138, 139, 140, 141, 142, 143, 144, 145, 146, 147, 148, 149, 150, 151, 152, 153, 154, 155, 156, 157, 158, 159, 160, 161, 162, 163, 164, 165, 166, 167, 168, 169, 170, 171, 172, 173, 174, 175, 176, 177, 178, 179, 180, 181, 182, 183, 184, 185, 186, 187, 188, 189, 190, 191, 192, 193, 194, 195, 196, 197, 198, 199, 200, 201, 202, 203, 204, 205, 206, 207, 208, 209, 210, 211, 212, 213, 214, 215, 216, 217, 218, 219, 220, 221, 222, 223, 224, 225, 226, 227, 228, 229, 230, 231, 232, 233, 234, 235, 236, 237, 238, 239, 240, 241, 242, 243, 244, 245, 246, 247, 248, 249, 250, 251, 252, 253, 254, 255, 256, 257, 258, 259, 260, 261, 262, 263, 264, 265, 266, 267, 268, 269, 270, 271, 272, 273, 274, 275, 276, 277, 278, 279, 280, 281, 282, 283, 284, 285, 286, 287, 288, 289, 290, 291, 292, 293, 294, 295, 296, 297, 298, 299, 300, 301, 312, or 313, a variant, derivative, orthologue, paralogue or homologue thereof, in which:

[0462] the amino acid at Mutated site 1 is Phe, and the amino acid at Mutated site 5 is Ile.

[0463] In another preferred embodiment, the mutated PPO comprises a sequence of SEQ ID NO: 1, 2, 3, 4, 5, 6, 7, 8, 9, 10, 11, 12, 13, 14, 15, 16, 17, 18, 19, 20, 21, 22, 23, 24, 25, 26, 27, 28, 29, 30, 31, 32, 33, 34, 35, 36, 37, 38, 39, 40, 41, 42, 43, 44, 45, 46, 47, 48, 49, 50, 51, 52, 53, 54, 55, 56, 57, 58, 59, 60, 61, 62, 63, 64, 65, 66, 67, 68, 69, 70, 71, 72, 73, 74, 75, 76, 77, 78, 79, 80, 81, 82, 83, 84, 85, 86, 87, 88, 89, 90, 91, 92, 93, 94, 95, 96, 97, 98, 99, 100, 101, 102, 103, 104, 105, 106, 107, 108, 109, 110, 111, 112, 113, 114, 115, 116, 117, 118, 119, 120, 121, 122, 123, 124, 125, 126, 127, 128, 129, 130, 131, 132, 133, 134, 135, 136, 137, 138, 139, 140, 141, 142, 143, 144, 145, 146, 147, 148, 149, 150, 151, 152, 153, 154, 155, 156, 157, 158, 159, 160, 161, 162, 163, 164, 165, 166, 167, 168, 169, 170, 171, 172, 173, 174, 175, 176, 177, 178, 179, 180, 181, 182, 183, 184, 185, 186, 187, 188, 189, 190, 191, 192, 193, 194, 195, 196, 197, 198, 199, 200, 201, 202, 203, 204, 205, 206, 207, 208, 209, 210, 211, 212, 213, 214, 215, 216, 217, 218, 219, 220, 221, 222, 223, 224, 225, 226, 227, 228, 229, 230, 231, 232, 233, 234, 235, 236, 237, 238, 239, 240, 241, 242, 243, 244, 245, 246, 247, 248, 249, 250, 251, 252, 253, 254, 255, 256, 257, 258, 259, 260, 261, 262, 263, 264, 265, 266, 267, 268, 269, 270, 271, 272, 273, 274, 275, 276, 277, 278, 279, 280, 281, 282, 283, 284, 285, 286, 287, 288, 289, 290, 291, 292, 293, 294, 295, 296, 297, 298, 299, 300, 301, 312, or 313, a variant, derivative, orthologue, paralogue or homologue thereof, in which:

[0464] the amino acid at Mutated site 1 is Phe, and the amino acid at Mutated site 5 is Met.

[0465] In another preferred embodiment, the mutated PPO comprises a sequence of SEQ ID NO: 1, 2, 3, 4, 5, 6, 7, 8, 9, 10, 11, 12, 13, 14, 15, 16, 17, 18, 19, 20, 21, 22, 23, 24, 25, 26, 27, 28, 29, 30, 31, 32, 33, 34, 35, 36, 37, 38, 39, 40, 41, 42, 43, 44, 45, 46, 47, 48, 49, 50, 51, 52, 53, 54, 55, 56, 57, 58, 59, 60, 61, 62, 63, 64, 65, 66, 67, 68, 69, 70, 71, 72, 73, 74, 75, 76, 77, 78, 79, 80, 81, 82, 83, 84, 85, 86, 87, 88, 89, 90, 91, 92, 93, 94, 95, 96, 97, 98, 99, 100, 101, 102, 103, 104, 105, 106, 107, 108, 109, 110, 111, 112, 113, 114, 115, 116, 117, 118, 119, 120, 121, 122, 123, 124, 125, 126, 127, 128, 129, 130, 131, 132, 133, 134, 135, 136, 137, 138, 139, 140, 141, 142, 143, 144, 145, 146, 147, 148, 149, 150, 151, 152, 153, 154, 155, 156, 157, 158, 159, 160, 161, 162, 163, 164, 165, 166, 167, 168, 169, 170, 171, 172, 173, 174, 175, 176, 177, 178, 179, 180, 181, 182, 183, 184, 185, 186, 187, 188, 189, 190, 191, 192, 193, 194, 195, 196, 197, 198, 199, 200, 201, 202, 203, 204, 205, 206, 207, 208, 209, 210, 211, 212, 213, 214, 215, 216, 217, 218, 219, 220, 221, 222, 223, 224, 225, 226, 227, 228, 229, 230, 231, 232, 233, 234, 235, 236, 237, 238, 239, 240, 241, 242, 243, 244, 245, 246, 247, 248, 249, 250, 251, 252, 253, 254, 255, 256, 257, 258, 259, 260, 261, 262, 263, 264, 265, 266, 267, 268, 269, 270, 271, 272, 273, 274, 275, 276, 277, 278, 279, 280, 281, 282, 283, 284, 285, 286, 287, 288, 289, 290, 291, 292, 293, 294, 295, 296, 297, 298, 299, 300, 301, 312, or 313, a variant, derivative, orthologue, paralogue or homologue thereof, in which:

[0466] the amino acid at Mutated site 1 is Ser, and the amino acid at Mutated site 5 is Ala.

[0467] In another preferred embodiment, the mutated PPO comprises a sequence of SEQ ID NO: 1, 2, 3, 4, 5, 6, 7, 8, 9, 10, 11, 12, 13, 14, 15, 16, 17, 18, 19, 20, 21, 22, 23, 24, 25, 26, 27, 28, 29, 30, 31, 32, 33, 34, 35, 36, 37, 38, 39, 40, 41, 42, 43, 44, 45, 46, 47, 48, 49, 50, 51, 52, 53, 54, 55, 56, 57, 58, 59, 60, 61, 62, 63, 64, 65, 66, 67, 68, 69, 70, 71, 72, 73, 74, 75, 76, 77, 78, 79, 80, 81, 82, 83, 84, 85, 86, 87, 88, 89, 90, 91, 92, 93, 94, 95, 96, 97, 98, 99, 100, 101, 102, 103, 104, 105, 106, 107, 108, 109, 110, 111, 112, 113, 114, 115, 116, 117, 118, 119, 120, 121, 122, 123, 124, 125, 126, 127, 128, 129, 130, 131, 132, 133, 134, 135, 136, 137, 138, 139, 140, 141, 142, 143, 144, 145, 146, 147, 148, 149, 150, 151, 152, 153, 154, 155, 156, 157, 158, 159, 160, 161, 162, 163, 164, 165, 166, 167, 168, 169, 170, 171, 172, 173, 174, 175, 176, 177, 178, 179, 180, 181, 182, 183, 184, 185, 186, 187, 188, 189, 190, 191, 192, 193, 194, 195, 196, 197, 198, 199, 200, 201, 202, 203, 204, 205, 206, 207, 208, 209, 210, 211, 212, 213, 214, 215, 216, 217, 218, 219, 220, 221, 222, 223, 224, 225, 226, 227, 228, 229, 230, 231, 232, 233, 234, 235, 236, 237, 238, 239, 240, 241, 242, 243, 244, 245, 246, 247, 248, 249, 250, 251, 252, 253, 254, 255, 256, 257, 258, 259, 260, 261, 262, 263, 264, 265, 266, 267, 268, 269, 270, 271, 272, 273, 274, 275, 276, 277, 278, 279, 280, 281, 282, 283, 284, 285, 286, 287, 288, 289, 290, 291, 292, 293, 294, 295, 296, 297, 298, 299, 300, 301, 312, or 313, a variant, derivative, orthologue, paralogue or homologue thereof, in which:

[0468] the amino acid at Mutated site 1 is Ser, and the amino acid at Mutated site 5 is Leu.

[0469] In another preferred embodiment, the mutated PPO comprises a sequence of SEQ ID NO: 1, 2, 3, 4, 5, 6, 7, 8, 9, 10, 11, 12, 13, 14, 15, 16, 17, 18, 19, 20, 21, 22, 23, 24, 25, 26, 27, 28, 29, 30, 31, 32, 33, 34, 35, 36, 37, 38, 39, 40, 41, 42, 43, 44, 45, 46, 47, 48, 49, 50, 51, 52, 53, 54, 55, 56, 57, 58, 59, 60, 61, 62, 63, 64, 65, 66, 67, 68, 69, 70, 71, 72, 73, 74, 75, 76, 77, 78, 79, 80, 81, 82, 83, 84, 85, 86, 87, 88, 89, 90, 91, 92, 93, 94, 95, 96, 97, 98, 99, 100, 101, 102, 103, 104, 105, 106, 107, 108, 109, 110, 111, 112, 113, 114, 115, 116, 117, 118, 119, 120, 121, 122, 123, 124, 125, 126, 127, 128, 129, 130, 131, 132, 133, 134, 135, 136, 137, 138, 139, 140, 141, 142, 143, 144, 145, 146, 147, 148, 149, 150, 151, 152, 153, 154, 155, 156, 157, 158, 159, 160, 161, 162, 163, 164, 165, 166, 167, 168, 169, 170, 171, 172, 173, 174, 175, 176, 177, 178, 179, 180, 181, 182, 183, 184, 185, 186, 187, 188, 189, 190, 191, 192, 193, 194, 195, 196, 197, 198, 199, 200, 201, 202, 203, 204, 205, 206, 207, 208, 209, 210, 211, 212, 213, 214, 215, 216, 217, 218, 219, 220, 221, 222, 223, 224, 225, 226, 227, 228, 229, 230, 231, 232, 233, 234, 235, 236, 237, 238, 239, 240, 241, 242, 243, 244, 245, 246, 247, 248, 249, 250, 251, 252, 253, 254, 255, 256, 257, 258, 259, 260, 261, 262, 263, 264, 265, 266, 267, 268, 269, 270, 271, 272, 273, 274, 275, 276, 277, 278, 279, 280, 281, 282, 283, 284, 285, 286, 287, 288, 289, 290, 291, 292, 293, 294, 295, 296, 297, 298, 299, 300, 301, 312, or 313, a variant, derivative, orthologue, paralogue or homologue thereof, in which:

[0470] the amino acid at Mutated site 1 is Ser, and the amino acid at Mutated site 5 is Val.

[0471] In another preferred embodiment, the mutated PPO comprises a sequence of SEQ ID NO: 1, 2, 3, 4, 5, 6, 7, 8, 9, 10, 11, 12, 13, 14, 15, 16, 17, 18, 19, 20, 21, 22, 23, 24, 25, 26, 27, 28, 29, 30, 31, 32, 33, 34, 35, 36, 37, 38, 39, 40, 41, 42, 43, 44, 45, 46, 47, 48, 49, 50, 51, 52, 53, 54, 55, 56, 57, 58, 59, 60, 61, 62, 63, 64, 65, 66, 67, 68, 69, 70, 71, 72, 73, 74, 75, 76, 77, 78, 79, 80, 81, 82, 83, 84, 85, 86, 87, 88, 89, 90, 91, 92, 93, 94, 95, 96, 97, 98, 99, 100, 101, 102, 103, 104, 105, 106, 107, 108, 109, 110, 111, 112, 113, 114, 115, 116, 117, 118, 119, 120, 121, 122, 123, 124, 125, 126, 127, 128, 129, 130, 131, 132, 133, 134, 135, 136, 137, 138, 139, 140, 141, 142, 143, 144, 145, 146, 147, 148, 149, 150, 151, 152, 153, 154, 155, 156, 157, 158, 159, 160, 161, 162, 163, 164, 165, 166, 167, 168, 169, 170, 171, 172, 173, 174, 175, 176, 177, 178, 179, 180, 181, 182, 183, 184, 185, 186, 187, 188, 189, 190, 191, 192, 193, 194, 195, 196, 197, 198, 199, 200, 201, 202, 203, 204, 205, 206, 207, 208, 209, 210, 211, 212, 213, 214, 215, 216, 217, 218, 219, 220, 221, 222, 223, 224, 225, 226, 227, 228, 229, 230, 231, 232, 233, 234, 235, 236, 237, 238, 239, 240, 241, 242, 243, 244, 245, 246, 247, 248, 249, 250, 251, 252, 253, 254, 255, 256, 257, 258, 259, 260, 261, 262, 263, 264, 265, 266, 267, 268, 269, 270, 271, 272, 273, 274, 275, 276, 277, 278, 279, 280, 281, 282, 283, 284, 285, 286, 287, 288, 289, 290, 291, 292, 293, 294, 295, 296, 297, 298, 299, 300, 301, 312, or 313, a variant, derivative, orthologue, paralogue or homologue thereof, in which:

[0472] the amino acid at Mutated site 1 is Ser, and the amino acid at Mutated site 5 is Ile.

[0473] In another preferred embodiment, the mutated PPO comprises a sequence of SEQ ID NO: 1, 2, 3, 4, 5, 6, 7, 8, 9, 10, 11, 12, 13, 14, 15, 16, 17, 18, 19, 20, 21, 22, 23, 24, 25, 26, 27, 28, 29, 30, 31, 32, 33, 34, 35, 36, 37, 38, 39, 40, 41, 42, 43, 44, 45, 46, 47, 48, 49, 50, 51, 52, 53, 54, 55, 56, 57, 58, 59, 60, 61, 62, 63, 64, 65, 66, 67, 68, 69, 70, 71, 72, 73, 74, 75, 76, 77, 78, 79, 80, 81, 82, 83, 84, 85, 86, 87, 88, 89, 90, 91, 92, 93, 94, 95, 96, 97, 98, 99, 100, 101, 102, 103, 104, 105, 106, 107, 108, 109, 110, 111, 112, 113, 114, 115, 116, 117, 118, 119, 120, 121, 122, 123, 124, 125, 126, 127, 128, 129, 130, 131, 132, 133, 134, 135, 136, 137, 138, 139, 140, 141, 142, 143, 144, 145, 146, 147, 148, 149, 150, 151, 152, 153, 154, 155, 156, 157, 158, 159, 160, 161, 162, 163, 164, 165, 166, 167, 168, 169, 170, 171, 172, 173, 174, 175, 176, 177, 178, 179, 180, 181, 182, 183, 184, 185, 186, 187, 188, 189, 190, 191, 192, 193, 194, 195, 196, 197, 198, 199, 200, 201, 202, 203, 204, 205, 206, 207, 208, 209, 210, 211, 212, 213, 214, 215, 216, 217, 218, 219, 220, 221, 222, 223, 224, 225, 226, 227, 228, 229, 230, 231, 232, 233, 234, 235, 236, 237, 238, 239, 240, 241, 242, 243, 244, 245, 246, 247, 248, 249, 250, 251, 252, 253, 254, 255, 256, 257, 258, 259, 260, 261, 262, 263, 264, 265, 266, 267, 268, 269, 270, 271, 272, 273, 274, 275, 276, 277, 278, 279, 280, 281, 282, 283, 284, 285, 286, 287, 288, 289, 290, 291, 292, 293, 294, 295, 296, 297, 298, 299, 300, 301, 312, or 313, a variant, derivative, orthologue, paralogue or homologue thereof, in which:

[0474] the amino acid at Mutated site 1 is Ser, and the amino acid at Mutated site 5 is Met.

[0475] In another preferred embodiment, the mutated PPO comprises a sequence of SEQ ID NO: 1, 2, 3, 4, 5, 6, 7, 8, 9, 10, 11, 12, 13, 14, 15, 16, 17, 18, 19, 20, 21, 22, 23, 24, 25, 26, 27, 28, 29, 30, 31, 32, 33, 34, 35, 36, 37, 38, 39, 40, 41, 42, 43, 44, 45, 46, 47, 48, 49, 50, 51, 52, 53, 54, 55, 56, 57, 58, 59, 60, 61, 62, 63, 64, 65, 66, 67, 68, 69, 70, 71, 72, 73, 74, 75, 76, 77, 78, 79, 80, 81, 82, 83, 84, 85, 86, 87, 88, 89, 90, 91, 92, 93, 94, 95, 96, 97, 98, 99, 100, 101, 102, 103, 104, 105, 106, 107, 108, 109, 110, 111, 112, 113, 114, 115, 116, 117, 118, 119, 120, 121, 122, 123, 124, 125, 126, 127, 128, 129, 130, 131, 132, 133, 134, 135, 136, 137, 138, 139, 140, 141, 142, 143, 144, 145, 146, 147, 148, 149, 150, 151, 152, 153, 154, 155, 156, 157, 158, 159, 160, 161, 162, 163, 164, 165, 166, 167, 168, 169, 170, 171, 172, 173, 174, 175, 176, 177, 178, 179, 180, 181, 182, 183, 184, 185, 186, 187, 188, 189, 190, 191, 192, 193, 194, 195, 196, 197, 198, 199, 200, 201, 202, 203, 204, 205, 206, 207, 208, 209, 210, 211, 212, 213, 214, 215, 216, 217, 218, 219, 220, 221, 222, 223, 224, 225, 226, 227, 228, 229, 230, 231, 232, 233, 234, 235, 236, 237, 238, 239, 240, 241, 242, 243, 244, 245, 246, 247, 248, 249, 250, 251, 252, 253, 254, 255, 256, 257, 258, 259, 260, 261, 262, 263, 264, 265, 266, 267, 268, 269, 270, 271, 272, 273, 274, 275, 276, 277, 278, 279, 280, 281, 282, 283, 284, 285, 286, 287, 288, 289, 290, 291, 292, 293, 294, 295, 296, 297, 298, 299, 300, 301, 312, or 313, a variant, derivative, orthologue, paralogue or homologue thereof, in which:

[0476] the amino acid at Mutated site 1 is Thr, and the amino acid at Mutated site 5 is Ala.

[0477] In another preferred embodiment, the mutated PPO comprises a sequence of SEQ ID NO: 1, 2, 3, 4, 5, 6, 7, 8, 9, 10, 11, 12, 13, 14, 15, 16, 17, 18, 19, 20, 21, 22, 23, 24, 25, 26, 27, 28, 29, 30, 31, 32, 33, 34, 35, 36, 37, 38, 39, 40, 41, 42, 43, 44, 45, 46, 47, 48, 49, 50, 51, 52, 53, 54, 55, 56, 57, 58, 59, 60, 61, 62, 63, 64, 65, 66, 67, 68, 69, 70, 71, 72, 73, 74, 75, 76, 77, 78, 79, 80, 81, 82, 83, 84, 85, 86, 87, 88, 89, 90, 91, 92, 93, 94, 95, 96, 97, 98, 99, 100, 101, 102, 103, 104, 105, 106, 107, 108, 109, 110, 111, 112, 113, 114, 115, 116, 117, 118, 119, 120, 121, 122, 123, 124, 125, 126, 127, 128, 129, 130, 131, 132, 133, 134, 135, 136, 137, 138, 139, 140, 141, 142, 143, 144, 145, 146, 147, 148, 149, 150, 151, 152, 153, 154, 155, 156, 157, 158, 159, 160, 161, 162, 163, 164, 165, 166, 167, 168, 169, 170, 171, 172, 173, 174, 175, 176, 177, 178, 179, 180, 181, 182, 183, 184, 185, 186, 187, 188, 189, 190, 191, 192, 193, 194, 195, 196, 197, 198, 199, 200, 201, 202, 203, 204, 205, 206, 207, 208, 209, 210, 211, 212, 213, 214, 215, 216, 217, 218, 219, 220, 221, 222, 223, 224, 225, 226, 227, 228, 229, 230, 231, 232, 233, 234, 235, 236, 237, 238, 239, 240, 241, 242, 243, 244, 245, 246, 247, 248, 249, 250, 251, 252, 253, 254, 255, 256, 257, 258, 259, 260, 261, 262, 263, 264, 265, 266, 267, 268, 269, 270, 271, 272, 273, 274, 275, 276, 277, 278, 279, 280, 281, 282, 283, 284, 285, 286, 287, 288, 289, 290, 291, 292, 293, 294, 295, 296, 297, 298, 299, 300, 301, 312, or 313, a variant, derivative, orthologue, paralogue or homologue thereof, in which:

[0478] the amino acid at Mutated site 1 is Thr, and the amino acid at Mutated site 5 is Leu.

[0479] In another preferred embodiment, the mutated PPO comprises a sequence of SEQ ID NO: 1, 2, 3, 4, 5, 6, 7, 8, 9, 10, 11, 12, 13, 14, 15, 16, 17, 18, 19, 20, 21, 22, 23, 24, 25, 26, 27, 28, 29, 30, 31, 32, 33, 34, 35, 36, 37, 38, 39, 40, 41, 42, 43, 44, 45, 46, 47, 48, 49, 50, 51, 52, 53, 54, 55, 56, 57, 58, 59, 60, 61, 62, 63, 64, 65, 66, 67, 68, 69, 70, 71, 72, 73, 74, 75, 76, 77, 78, 79, 80, 81, 82, 83, 84, 85, 86, 87, 88, 89, 90, 91, 92, 93, 94, 95, 96, 97, 98, 99, 100, 101, 102, 103, 104, 105, 106, 107, 108, 109, 110, 111, 112, 113, 114, 115, 116, 117, 118, 119, 120, 121, 122, 123, 124, 125, 126, 127, 128, 129, 130, 131, 132, 133, 134, 135, 136, 137, 138, 139, 140, 141, 142, 143, 144, 145, 146, 147, 148, 149, 150, 151, 152, 153, 154, 155, 156, 157, 158, 159, 160, 161, 162, 163, 164, 165, 166, 167, 168, 169, 170, 171, 172, 173, 174, 175, 176, 177, 178, 179, 180, 181, 182, 183, 184, 185, 186, 187, 188, 189, 190, 191, 192, 193, 194, 195, 196, 197, 198, 199, 200, 201, 202, 203, 204, 205, 206, 207, 208, 209, 210, 211, 212, 213, 214, 215, 216, 217, 218, 219, 220, 221, 222, 223, 224, 225, 226, 227, 228, 229, 230, 231, 232, 233, 234, 235, 236, 237, 238, 239, 240, 241, 242, 243, 244, 245, 246, 247, 248, 249, 250, 251, 252, 253, 254, 255, 256, 257, 258, 259, 260, 261, 262, 263, 264, 265, 266, 267, 268, 269, 270, 271, 272, 273, 274, 275, 276, 277, 278, 279, 280, 281, 282, 283, 284, 285, 286, 287, 288, 289, 290, 291, 292, 293, 294, 295, 296, 297, 298, 299, 300, 301, 312, or 313, a variant, derivative, orthologue, paralogue or homologue thereof, in which:

[0480] the amino acid at Mutated site 1 is Thr, and the amino acid at Mutated site 5 is Val.

[0481] In another preferred embodiment, the mutated PPO comprises a sequence of SEQ ID NO: 1, 2, 3, 4, 5, 6, 7, 8, 9, 10, 11, 12, 13, 14, 15, 16, 17, 18, 19, 20, 21, 22, 23, 24, 25, 26, 27, 28, 29, 30, 31, 32, 33, 34, 35, 36, 37, 38, 39, 40, 41, 42, 43, 44, 45, 46, 47, 48, 49, 50, 51, 52, 53, 54, 55, 56, 57, 58, 59, 60, 61, 62, 63, 64, 65, 66, 67, 68, 69, 70, 71, 72, 73, 74, 75, 76, 77, 78, 79, 80, 81, 82, 83, 84, 85, 86, 87, 88, 89, 90, 91, 92, 93, 94, 95, 96, 97, 98, 99, 100, 101, 102, 103, 104, 105, 106, 107, 108, 109, 110, 111, 112, 113, 114, 115, 116, 117, 118, 119, 120, 121, 122, 123, 124, 125, 126, 127, 128, 129, 130, 131, 132, 133, 134, 135, 136, 137, 138, 139, 140, 141, 142, 143, 144, 145, 146, 147, 148, 149, 150, 151, 152, 153, 154, 155, 156, 157, 158, 159, 160, 161, 162, 163, 164, 165, 166, 167, 168, 169, 170, 171, 172, 173, 174, 175, 176, 177, 178, 179, 180, 181, 182, 183, 184, 185, 186, 187, 188, 189, 190, 191, 192, 193, 194, 195, 196, 197, 198, 199, 200, 201, 202, 203, 204, 205, 206, 207, 208, 209, 210, 211, 212, 213, 214, 215, 216, 217, 218, 219, 220, 221, 222, 223, 224, 225, 226, 227, 228, 229, 230, 231, 232, 233, 234, 235, 236, 237, 238, 239, 240, 241, 242, 243, 244, 245, 246, 247, 248, 249, 250, 251, 252, 253, 254, 255, 256, 257, 258, 259, 260, 261, 262, 263, 264, 265, 266, 267, 268, 269, 270, 271, 272, 273, 274, 275, 276, 277, 278, 279, 280, 281, 282, 283, 284, 285, 286, 287, 288, 289, 290, 291, 292, 293, 294, 295, 296, 297, 298, 299, 300, 301, 312, or 313, a variant, derivative, orthologue, paralogue or homologue thereof, in which:

[0482] the amino acid at Mutated site 1 is Thr, and the amino acid at Mutated site 5 is Ile.

[0483] In another preferred embodiment, the mutated PPO comprises a sequence of SEQ ID NO: 1, 2, 3, 4, 5, 6, 7, 8, 9, 10, 11, 12, 13, 14, 15, 16, 17, 18, 19, 20, 21, 22, 23, 24, 25, 26, 27, 28, 29, 30, 31, 32, 33, 34, 35, 36, 37, 38, 39, 40, 41, 42, 43, 44, 45, 46, 47, 48, 49, 50, 51, 52, 53, 54, 55, 56, 57, 58, 59, 60, 61, 62, 63, 64, 65, 66, 67, 68, 69, 70, 71, 72, 73, 74, 75, 76, 77, 78, 79, 80, 81, 82, 83, 84, 85, 86, 87, 88, 89, 90, 91, 92, 93, 94, 95, 96, 97, 98, 99, 100, 101, 102, 103, 104, 105, 106, 107, 108, 109, 110, 111, 112, 113, 114, 115, 116, 117, 118, 119, 120, 121, 122, 123, 124, 125, 126, 127, 128, 129, 130, 131, 132, 133, 134, 135, 136, 137, 138, 139, 140, 141, 142, 143, 144, 145, 146, 147, 148, 149, 150, 151, 152, 153, 154, 155, 156, 157, 158, 159, 160, 161, 162, 163, 164, 165, 166, 167, 168, 169, 170, 171, 172, 173, 174, 175, 176, 177, 178, 179, 180, 181, 182, 183, 184, 185, 186, 187, 188, 189, 190, 191, 192, 193, 194, 195, 196, 197, 198, 199, 200, 201, 202, 203, 204, 205, 206, 207, 208, 209, 210, 211, 212, 213, 214, 215, 216, 217, 218, 219, 220, 221, 222, 223, 224, 225, 226, 227, 228, 229, 230, 231, 232, 233, 234, 235, 236, 237, 238, 239, 240, 241, 242, 243, 244, 245, 246, 247, 248, 249, 250, 251, 252, 253, 254, 255, 256, 257, 258, 259, 260, 261, 262, 263, 264, 265, 266, 267, 268, 269, 270, 271, 272, 273, 274, 275, 276, 277, 278, 279, 280, 281, 282, 283, 284, 285, 286, 287, 288, 289, 290, 291, 292, 293, 294, 295, 296, 297, 298, 299, 300, 301, 312, or 313, a variant, derivative, orthologue, paralogue or homologue thereof, in which:

[0484] the amino acid at Mutated site 1 is Thr, and the amino acid at Mutated site 5 is Met.

[0485] In another preferred embodiment, the mutated PPO comprises a sequence of SEQ ID NO: 1, 2, 3, 4, 5, 6, 7, 8, 9, 10, 11, 12, 13, 14, 15, 16, 17, 18, 19, 20, 21, 22, 23, 24, 25, 26, 27, 28, 29, 30, 31, 32, 33, 34, 35, 36, 37, 38, 39, 40, 41, 42, 43, 44, 45, 46, 47, 48, 49, 50, 51, 52, 53, 54, 55, 56, 57, 58, 59, 60, 61, 62, 63, 64, 65, 66, 67, 68, 69, 70, 71, 72, 73, 74, 75, 76, 77, 78, 79, 80, 81, 82, 83, 84, 85, 86, 87, 88, 89, 90, 91, 92, 93, 94, 95, 96, 97, 98, 99, 100, 101, 102, 103, 104, 105, 106, 107, 108, 109, 110, 111, 112, 113, 114, 115, 116, 117, 118, 119, 120, 121, 122, 123, 124, 125, 126, 127, 128, 129, 130, 131, 132, 133, 134, 135, 136, 137, 138, 139, 140, 141, 142, 143, 144, 145, 146, 147, 148, 149, 150, 151, 152, 153, 154, 155, 156, 157, 158, 159, 160, 161, 162, 163, 164, 165, 166, 167, 168, 169, 170, 171, 172, 173, 174, 175, 176, 177, 178, 179, 180, 181, 182, 183, 184, 185, 186, 187, 188, 189, 190, 191, 192, 193, 194, 195, 196, 197, 198, 199, 200, 201, 202, 203, 204, 205, 206, 207, 208, 209, 210, 211, 212, 213, 214, 215, 216, 217, 218, 219, 220, 221, 222, 223, 224, 225, 226, 227, 228, 229, 230, 231, 232, 233, 234, 235, 236, 237, 238, 239, 240, 241, 242, 243, 244, 245, 246, 247, 248, 249, 250, 251, 252, 253, 254, 255, 256, 257, 258, 259, 260, 261, 262, 263, 264, 265, 266, 267, 268, 269, 270, 271, 272, 273, 274, 275, 276, 277, 278, 279, 280, 281, 282, 283, 284, 285, 286, 287, 288, 289, 290, 291, 292, 293, 294, 295, 296, 297, 298, 299, 300, 301, 312, or 313, a variant, derivative, orthologue, paralogue or homologue thereof, in which:

[0486] the amino acid at Mutated site 1 is Gln, and the amino acid at Mutated site 5 is Ala.

[0487] In another preferred embodiment, the mutated PPO comprises a sequence of SEQ ID NO: 1, 2, 3, 4, 5, 6, 7, 8, 9, 10, 11, 12, 13, 14, 15, 16, 17, 18, 19, 20, 21, 22, 23, 24, 25, 26, 27, 28, 29, 30, 31, 32, 33, 34, 35, 36, 37, 38, 39, 40, 41, 42, 43, 44, 45, 46, 47, 48, 49, 50, 51, 52, 53, 54, 55, 56, 57, 58, 59, 60, 61, 62, 63, 64, 65, 66, 67, 68, 69, 70, 71, 72, 73, 74, 75, 76, 77, 78, 79, 80, 81, 82, 83, 84, 85, 86, 87, 88, 89, 90, 91, 92, 93, 94, 95, 96, 97, 98, 99, 100, 101, 102, 103, 104, 105, 106, 107, 108, 109, 110, 111, 112, 113, 114, 115, 116, 117, 118, 119, 120, 121, 122, 123, 124, 125, 126, 127, 128, 129, 130, 131, 132, 133, 134, 135, 136, 137, 138, 139, 140, 141, 142, 143, 144, 145, 146, 147, 148, 149, 150, 151, 152, 153, 154, 155, 156, 157, 158, 159, 160, 161, 162, 163, 164, 165, 166, 167, 168, 169, 170, 171, 172, 173, 174, 175, 176, 177, 178, 179, 180, 181, 182, 183, 184, 185, 186, 187, 188, 189, 190, 191, 192, 193, 194, 195, 196, 197, 198, 199, 200, 201, 202, 203, 204, 205, 206, 207, 208, 209, 210, 211, 212, 213, 214, 215, 216, 217, 218, 219, 220, 221, 222, 223, 224, 225, 226, 227, 228, 229, 230, 231, 232, 233, 234, 235, 236, 237, 238, 239, 240, 241, 242, 243, 244, 245, 246, 247, 248, 249, 250, 251, 252, 253, 254, 255, 256, 257, 258, 259, 260, 261, 262, 263, 264, 265, 266, 267, 268, 269, 270, 271, 272, 273, 274, 275, 276, 277, 278, 279, 280, 281, 282, 283, 284, 285, 286, 287, 288, 289, 290, 291, 292, 293, 294, 295, 296, 297, 298, 299, 300, 301, 312, or 313, a variant, derivative, orthologue, paralogue or homologue thereof, in which:

[0488] the amino acid at Mutated site 1 is Gin, and the amino acid at Mutated site 5 is Leu.

[0489] In another preferred embodiment, the mutated PPO comprises a sequence of SEQ ID NO: 1, 2, 3, 4, 5, 6, 7, 8, 9, 10, 11, 12, 13, 14, 15, 16, 17, 18, 19, 20, 21, 22, 23, 24, 25, 26, 27, 28, 29, 30, 31, 32, 33, 34, 35, 36, 37, 38, 39, 40, 41, 42, 43, 44, 45, 46, 47, 48, 49, 50, 51, 52, 53, 54, 55, 56, 57, 58, 59, 60, 61, 62, 63, 64, 65, 66, 67, 68, 69, 70, 71, 72, 73, 74, 75, 76, 77, 78, 79, 80, 81, 82, 83, 84, 85, 86, 87, 88, 89, 90, 91, 92, 93, 94, 95, 96, 97, 98, 99, 100, 101, 102, 103, 104, 105, 106, 107, 108, 109, 110, 111, 112, 113, 114, 115, 116, 117, 118, 119, 120, 121, 122, 123, 124, 125, 126, 127, 128, 129, 130, 131, 132, 133, 134, 135, 136, 137, 138, 139, 140, 141, 142, 143, 144, 145, 146, 147, 148, 149, 150, 151, 152, 153, 154, 155, 156, 157, 158, 159, 160, 161, 162, 163, 164, 165, 166, 167, 168, 169, 170, 171, 172, 173, 174, 175, 176, 177, 178, 179, 180, 181, 182, 183, 184, 185, 186, 187, 188, 189, 190, 191, 192, 193, 194, 195, 196, 197, 198, 199, 200, 201, 202, 203, 204, 205, 206, 207, 208, 209, 210, 211, 212, 213, 214, 215, 216, 217, 218, 219, 220, 221, 222, 223, 224, 225, 226, 227, 228, 229, 230, 231, 232, 233, 234, 235, 236, 237, 238, 239, 240, 241, 242, 243, 244, 245, 246, 247, 248, 249, 250, 251, 252, 253, 254, 255, 256, 257, 258, 259, 260, 261, 262, 263, 264, 265, 266, 267, 268, 269, 270, 271, 272, 273, 274, 275, 276, 277, 278, 279, 280, 281, 282, 283, 284, 285, 286, 287, 288, 289, 290, 291, 292, 293, 294, 295, 296, 297, 298, 299, 300, 301, 312, or 313, a variant, derivative, orthologue, paralogue or homologue thereof, in which:

[0490] the amino acid at Mutated site 1 is Gln, and the amino acid at Mutated site 5 is Val.

[0491] In another preferred embodiment, the mutated PPO comprises a sequence of SEQ ID NO: 1, 2, 3, 4, 5, 6, 7, 8, 9, 10, 11, 12, 13, 14, 15, 16, 17, 18, 19, 20, 21, 22, 23, 24, 25, 26, 27, 28, 29, 30, 31, 32, 33, 34, 35, 36, 37, 38, 39, 40, 41, 42, 43, 44, 45, 46, 47, 48, 49, 50, 51, 52, 53, 54, 55, 56, 57, 58, 59, 60, 61, 62, 63, 64, 65, 66, 67, 68, 69, 70, 71, 72, 73, 74, 75, 76, 77, 78, 79, 80, 81, 82, 83, 84, 85, 86, 87, 88, 89, 90, 91, 92, 93, 94, 95, 96, 97, 98, 99, 100, 101, 102, 103, 104, 105, 106, 107, 108, 109, 110, 111, 112, 113, 114, 115, 116, 117, 118, 119, 120, 121, 122, 123, 124, 125, 126, 127, 128, 129, 130, 131, 132, 133, 134, 135, 136, 137, 138, 139, 140, 141, 142, 143, 144, 145, 146, 147, 148, 149, 150, 151, 152, 153, 154, 155, 156, 157, 158, 159, 160, 161, 162, 163, 164, 165, 166, 167, 168, 169, 170, 171, 172, 173, 174, 175, 176, 177, 178, 179, 180, 181, 182, 183, 184, 185, 186, 187, 188, 189, 190, 191, 192, 193, 194, 195, 196, 197, 198, 199, 200, 201, 202, 203, 204, 205, 206, 207, 208, 209, 210, 211, 212, 213, 214, 215, 216, 217, 218, 219, 220, 221, 222, 223, 224, 225, 226, 227, 228, 229, 230, 231, 232, 233, 234, 235, 236, 237, 238, 239, 240, 241, 242, 243, 244, 245, 246, 247, 248, 249, 250, 251, 252, 253, 254, 255, 256, 257, 258, 259, 260, 261, 262, 263, 264, 265, 266, 267, 268, 269, 270, 271, 272, 273, 274, 275, 276, 277, 278, 279, 280, 281, 282, 283, 284, 285, 286, 287, 288, 289, 290, 291, 292, 293, 294, 295, 296, 297, 298, 299, 300, 301, 312, or 313, a variant, derivative, orthologue, paralogue or homologue thereof, in which:

[0492] the amino acid at Mutated site 1 is Gln, and the amino acid at Mutated site 5 is Ile.

[0493] In another preferred embodiment, the mutated PPO comprises a sequence of SEQ ID NO: 1, 2, 3, 4, 5, 6, 7, 8, 9, 10, 11, 12, 13, 14, 15, 16, 17, 18, 19, 20, 21, 22, 23, 24, 25, 26, 27, 28, 29, 30, 31, 32, 33, 34, 35, 36, 37, 38, 39, 40, 41, 42, 43, 44, 45, 46, 47, 48, 49, 50, 51, 52, 53, 54, 55, 56, 57, 58, 59, 60, 61, 62, 63, 64, 65, 66, 67, 68, 69, 70, 71, 72, 73, 74, 75, 76, 77, 78, 79, 80, 81, 82, 83, 84, 85, 86, 87, 88, 89, 90, 91, 92, 93, 94, 95, 96, 97, 98, 99, 100, 101, 102, 103, 104, 105, 106, 107, 108, 109, 110, 111, 112, 113, 114, 115, 116, 117, 118, 119, 120, 121, 122, 123, 124, 125, 126, 127, 128, 129, 130, 131, 132, 133, 134, 135, 136, 137, 138, 139, 140, 141, 142, 143, 144, 145, 146, 147, 148, 149, 150, 151, 152, 153, 154, 155, 156, 157, 158, 159, 160, 161, 162, 163, 164, 165, 166, 167, 168, 169, 170, 171, 172, 173, 174, 175, 176, 177, 178, 179, 180, 181, 182, 183, 184, 185, 186, 187, 188, 189, 190, 191, 192, 193, 194, 195, 196, 197, 198, 199, 200, 201, 202, 203, 204, 205, 206, 207, 208, 209, 210, 211, 212, 213, 214, 215, 216, 217, 218, 219, 220, 221, 222, 223, 224, 225, 226, 227, 228, 229, 230, 231, 232, 233, 234, 235, 236, 237, 238, 239, 240, 241, 242, 243, 244, 245, 246, 247, 248, 249, 250, 251, 252, 253, 254, 255, 256, 257, 258, 259, 260, 261, 262, 263, 264, 265, 266, 267, 268, 269, 270, 271, 272, 273, 274, 275, 276, 277, 278, 279, 280, 281, 282, 283, 284, 285, 286, 287, 288, 289, 290, 291, 292, 293, 294, 295, 296, 297, 298, 299, 300, 301, 312, or 313, a variant, derivative, orthologue, paralogue or homologue thereof, in which:

[0494] the amino acid at Mutated site 1 is Gln, and the amino acid at Mutated site 5 is Met.

[0495] In another preferred embodiment, the mutated PPO comprises a sequence of SEQ ID NO: 1, 2, 3, 4, 5, 6, 7, 8, 9, 10, 11, 12, 13, 14, 15, 16, 17, 18, 19, 20, 21, 22, 23, 24, 25, 26, 27, 28, 29, 30, 31, 32, 33, 34, 35, 36, 37, 38, 39, 40, 41, 42, 43, 44, 45, 46, 47, 48, 49, 50, 51, 52, 53, 54, 55, 56, 57, 58, 59, 60, 61, 62, 63, 64, 65, 66, 67, 68, 69, 70, 71, 72, 73, 74, 75, 76, 77, 78, 79, 80, 81, 82, 83, 84, 85, 86, 87, 88, 89, 90, 91, 92, 93, 94, 95, 96, 97, 98, 99, 100, 101, 102, 103, 104, 105, 106, 107, 108, 109, 110, 111, 112, 113, 114, 115, 116, 117, 118, 119, 120, 121, 122, 123, 124, 125, 126, 127, 128, 129, 130, 131, 132, 133, 134, 135, 136, 137, 138, 139, 140, 141, 142, 143, 144, 145, 146, 147, 148, 149, 150, 151, 152, 153, 154, 155, 156, 157, 158, 159, 160, 161, 162, 163, 164, 165, 166, 167, 168, 169, 170, 171, 172, 173, 174, 175, 176, 177, 178, 179, 180, 181, 182, 183, 184, 185, 186, 187, 188, 189, 190, 191, 192, 193, 194, 195, 196, 197, 198, 199, 200, 201, 202, 203, 204, 205, 206, 207, 208, 209, 210, 211, 212, 213, 214, 215, 216, 217, 218, 219, 220, 221, 222, 223, 224, 225, 226, 227, 228, 229, 230, 231, 232, 233, 234, 235, 236, 237, 238, 239, 240, 241, 242, 243, 244, 245, 246, 247, 248, 249, 250, 251, 252, 253, 254, 255, 256, 257, 258, 259, 260, 261, 262, 263, 264, 265, 266, 267, 268, 269, 270, 271, 272, 273, 274, 275, 276, 277, 278, 279, 280, 281, 282, 283, 284, 285, 286, 287, 288, 289, 290, 291, 292, 293, 294, 295, 296, 297, 298, 299, 300, 301, 312, or 313, a variant, derivative, orthologue, paralogue or homologue thereof, in which:

[0496] the amino acid at Mutated site 1 is His, and the amino acid at Mutated site 5 is Ala.

[0497] In another preferred embodiment, the mutated PPO comprises a sequence of SEQ ID NO: 1, 2, 3, 4, 5, 6, 7, 8, 9, 10, 11, 12, 13, 14, 15, 16, 17, 18, 19, 20, 21, 22, 23, 24, 25, 26, 27, 28, 29, 30, 31, 32, 33, 34, 35, 36, 37, 38, 39, 40, 41, 42, 43, 44, 45, 46, 47, 48, 49, 50, 51, 52, 53, 54, 55, 56, 57, 58, 59, 60, 61, 62, 63, 64, 65, 66, 67, 68, 69, 70, 71, 72, 73, 74, 75, 76, 77, 78, 79, 80, 81, 82, 83, 84, 85, 86, 87, 88, 89, 90, 91, 92, 93, 94, 95, 96, 97, 98, 99, 100, 101, 102, 103, 104, 105, 106, 107, 108, 109, 110, 111, 112, 113, 114, 115, 116, 117, 118, 119, 120, 121, 122, 123, 124, 125, 126, 127, 128, 129, 130, 131, 132, 133, 134, 135, 136, 137, 138, 139, 140, 141, 142, 143, 144, 145, 146, 147, 148, 149, 150, 151, 152, 153, 154, 155, 156, 157, 158, 159, 160, 161, 162, 163, 164, 165, 166, 167, 168, 169, 170, 171, 172, 173, 174, 175, 176, 177, 178, 179, 180, 181, 182, 183, 184, 185, 186, 187, 188, 189, 190, 191, 192, 193, 194, 195, 196, 197, 198, 199, 200, 201, 202, 203, 204, 205, 206, 207, 208, 209, 210, 211, 212, 213, 214, 215, 216, 217, 218, 219, 220, 221, 222, 223, 224, 225, 226, 227, 228, 229, 230, 231, 232, 233, 234, 235, 236, 237, 238, 239, 240, 241, 242, 243, 244, 245, 246, 247, 248, 249, 250, 251, 252, 253, 254, 255, 256, 257, 258, 259, 260, 261, 262, 263, 264, 265, 266, 267, 268, 269, 270, 271, 272, 273, 274, 275, 276, 277, 278, 279, 280, 281, 282, 283, 284, 285, 286, 287, 288, 289, 290, 291, 292, 293, 294, 295, 296, 297, 298, 299, 300, 301, 312, or 313, a variant, derivative, orthologue, paralogue or homologue thereof, in which:

[0498] the amino acid at Mutated site 1 is His, and the amino acid at Mutated site 5 is Leu.

[0499] In another preferred embodiment, the mutated PPO comprises a sequence of SEQ ID NO: 1, 2, 3, 4, 5, 6, 7, 8, 9, 10, 11, 12, 13, 14, 15, 16, 17, 18, 19, 20, 21, 22, 23, 24, 25, 26, 27, 28, 29, 30, 31, 32, 33, 34, 35, 36, 37, 38, 39, 40, 41, 42, 43, 44, 45, 46, 47, 48, 49, 50, 51, 52, 53, 54, 55, 56, 57, 58, 59, 60, 61, 62, 63, 64, 65, 66, 67, 68, 69, 70, 71, 72, 73, 74, 75, 76, 77, 78, 79, 80, 81, 82, 83, 84, 85, 86, 87, 88, 89, 90, 91, 92, 93, 94, 95, 96, 97, 98, 99, 100, 101, 102, 103, 104, 105, 106, 107, 108, 109, 110, 111, 112, 113, 114, 115, 116, 117, 118, 119, 120, 121, 122, 123, 124, 125, 126, 127, 128, 129, 130, 131, 132, 133, 134, 135, 136, 137, 138, 139, 140, 141, 142, 143, 144, 145, 146, 147, 148, 149, 150, 151, 152, 153, 154, 155, 156, 157, 158, 159, 160, 161, 162, 163, 164, 165, 166, 167, 168, 169, 170, 171, 172, 173, 174, 175, 176, 177, 178, 179, 180, 181, 182, 183, 184, 185, 186, 187, 188, 189, 190, 191, 192, 193, 194, 195, 196, 197, 198, 199, 200, 201, 202, 203, 204, 205, 206, 207, 208, 209, 210, 211, 212, 213, 214, 215, 216, 217, 218, 219, 220, 221, 222, 223, 224, 225, 226, 227, 228, 229, 230, 231, 232, 233, 234, 235, 236, 237, 238, 239, 240, 241, 242, 243, 244, 245, 246, 247, 248, 249, 250, 251, 252, 253, 254, 255, 256, 257, 258, 259, 260, 261, 262, 263, 264, 265, 266, 267, 268, 269, 270, 271, 272, 273, 274, 275, 276, 277, 278, 279, 280, 281, 282, 283, 284, 285, 286, 287, 288, 289, 290, 291, 292, 293, 294, 295, 296, 297, 298, 299, 300, 301, 312, or 313, a variant, derivative, orthologue, paralogue or homologue thereof, in which:

[0500] the amino acid at Mutated site 1 is His, and the amino acid at Mutated site 5 is Val.

[0501] In another preferred embodiment, the mutated PPO comprises a sequence of SEQ ID NO: 1, 2, 3, 4, 5, 6, 7, 8, 9, 10, 11, 12, 13, 14, 15, 16, 17, 18, 19, 20, 21, 22, 23, 24, 25, 26, 27, 28, 29, 30, 31, 32, 33, 34, 35, 36, 37, 38, 39, 40, 41, 42, 43, 44, 45, 46, 47, 48, 49, 50, 51, 52, 53, 54, 55, 56, 57, 58, 59, 60, 61, 62, 63, 64, 65, 66, 67, 68, 69, 70, 71, 72, 73, 74, 75, 76, 77, 78, 79, 80, 81, 82, 83, 84, 85, 86, 87, 88, 89, 90, 91, 92, 93, 94, 95, 96, 97, 98, 99, 100, 101, 102, 103, 104, 105, 106, 107, 108, 109, 110, 111, 112, 113, 114, 115, 116, 117, 118, 119, 120, 121, 122, 123, 124, 125, 126, 127, 128, 129, 130, 131, 132, 133, 134, 135, 136, 137, 138, 139, 140, 141, 142, 143, 144, 145, 146, 147, 148, 149, 150, 151, 152, 153, 154, 155, 156, 157, 158, 159, 160, 161, 162, 163, 164, 165, 166, 167, 168, 169, 170, 171, 172, 173, 174, 175, 176, 177, 178, 179, 180, 181, 182, 183, 184, 185, 186, 187, 188, 189, 190, 191, 192, 193, 194, 195, 196, 197, 198, 199, 200, 201, 202, 203, 204, 205, 206, 207, 208, 209, 210, 211, 212, 213, 214, 215, 216, 217, 218, 219, 220, 221, 222, 223, 224, 225, 226, 227, 228, 229, 230, 231, 232, 233, 234, 235, 236, 237, 238, 239, 240, 241, 242, 243, 244, 245, 246, 247, 248, 249, 250, 251, 252, 253, 254, 255, 256, 257, 258, 259, 260, 261, 262, 263, 264, 265, 266, 267, 268, 269, 270, 271, 272, 273, 274, 275, 276, 277, 278, 279, 280, 281, 282, 283, 284, 285, 286, 287, 288, 289, 290, 291, 292, 293, 294, 295, 296, 297, 298, 299, 300, 301, 312, or 313, a variant, derivative, orthologue, paralogue or homologue thereof, in which:

[0502] the amino acid at Mutated site 1 is His, and the amino acid at Mutated site 5 is Ile.

[0503] In another preferred embodiment, the mutated PPO comprises a sequence of SEQ ID NO: 1, 2, 3, 4, 5, 6, 7, 8, 9, 10, 11, 12, 13, 14, 15, 16, 17, 18, 19, 20, 21, 22, 23, 24, 25, 26, 27, 28, 29, 30, 31, 32, 33, 34, 35, 36, 37, 38, 39, 40, 41, 42, 43, 44, 45, 46, 47, 48, 49, 50, 51, 52, 53, 54, 55, 56, 57, 58, 59, 60, 61, 62, 63, 64, 65, 66, 67, 68, 69, 70, 71, 72, 73, 74, 75, 76, 77, 78, 79, 80, 81, 82, 83, 84, 85, 86, 87, 88, 89, 90, 91, 92, 93, 94, 95, 96, 97, 98, 99, 100, 101, 102, 103, 104, 105, 106, 107, 108, 109, 110, 111, 112, 113, 114, 115, 116, 117, 118, 119, 120, 121, 122, 123, 124, 125, 126, 127, 128, 129, 130, 131, 132, 133, 134, 135, 136, 137, 138, 139, 140, 141, 142, 143, 144, 145, 146, 147, 148, 149, 150, 151, 152, 153, 154, 155, 156, 157, 158, 159, 160, 161, 162, 163, 164, 165, 166, 167, 168, 169, 170, 171, 172, 173, 174, 175, 176, 177, 178, 179, 180, 181, 182, 183, 184, 185, 186, 187, 188, 189, 190, 191, 192, 193, 194, 195, 196, 197, 198, 199, 200, 201, 202, 203, 204, 205, 206, 207, 208, 209, 210, 211, 212, 213, 214, 215, 216, 217, 218, 219, 220, 221, 222, 223, 224, 225, 226, 227, 228, 229, 230, 231, 232, 233, 234, 235, 236, 237, 238, 239, 240, 241, 242, 243, 244, 245, 246, 247, 248, 249, 250, 251, 252, 253, 254, 255, 256, 257, 258, 259, 260, 261, 262, 263, 264, 265, 266, 267, 268, 269, 270, 271, 272, 273, 274, 275, 276, 277, 278, 279, 280, 281, 282, 283, 284, 285, 286, 287, 288, 289, 290, 291, 292, 293, 294, 295, 296, 297, 298, 299, 300, 301, 312, or 313, a variant, derivative, orthologue, paralogue or homologue thereof, in which:

[0504] the amino acid at Mutated site 1 is His, and the amino acid at Mutated site 5 is Met.

[0505] In another preferred embodiment, the mutated PPO refers to a polypeptide of SEQ ID NO: 1, 2, 3, 4, 5, 6, 7, 8, 9, 10, 11, 12, 13, 14, 15, 16, 17, 18, 19, 20, 21, 22, 23, 24, 25, 26, 27, 28, 29, 30, 31, 32, 33, 34, 35, 36, 37, 38, 39, 40, 41, 42, 43, 44, 45, 46, 47, 48, 49, 50, 51, 52, 53, 54, 55, 56, 57, 58, 59, 60, 61, 62, 63, 64, 65, 66, 67, 68, 69, 70, 71, 72, 73, 74, 75, 76, 77, 78, 79, 80, 81, 82, 83, 84, 85, 86, 87, 88, 89, 90, 91, 92, 93, 94, 95, 96, 97, 98, 99, 100, 101, 102, 103, 104, 105, 106, 107, 108, 109, 110, 111, 112, 113, 114, 115, 116, 117, 118, 119, 120, 121, 122, 123, 124, 125, 126, 127, 128, 129, 130, 131, 132, 133, 134, 135, 136, 137, 138, 139, 140, 141, 142, 143, 144, 145, 146, 147, 148, 149, 150, 151, 152, 153, 154, 155, 156, 157, 158, 159, 160, 161, 162, 163, 164, 165, 166, 167, 168, 169, 170, 171, 172, 173, 174, 175, 176, 177, 178, 179, 180, 181, 182, 183, 184, 185, 186, 187, 188, 189, 190, 191, 192, 193, 194, 195, 196, 197, 198, 199, 200, 201, 202, 203, 204, 205, 206, 207, 208, 209, 210, 211, 212, 213, 214, 215, 216, 217, 218, 219, 220, 221, 222, 223, 224, 225, 226, 227, 228, 229, 230, 231, 232, 233, 234, 235, 236, 237, 238, 239, 240, 241, 242, 243, 244, 245, 246, 247, 248, 249, 250, 251, 252, 253, 254, 255, 256, 257, 258, 259, 260, 261, 262, 263, 264, 265, 266, 267, 268, 269, 270, 271, 272, 273, 274, 275, 276, 277, 278, 279, 280, 281, 282, 283, 284, 285, 286, 287, 288, 289, 290, 291, 292, 293, 294, 295, 296, 297, 298, 299, 300, 301, 312, or 313, in which the amino acid sequence differs at Mutated site 4 (which corresponds to Leu397 of SEQ ID NO: 1) according to Table 2a, and/or at Mutated site 5 (which corresponds to Phe420 of SEQ ID NO: 1) according to Table 2a.

[0506] Examples of differences at these amino acid positions include, but are not limited to, one or more of the following:

[0507] the amino acid at Mutated site 4 is other than Leucine (or Alanine, or Serine, or Phenylalanine, as the case may be according to Table 2a);

[0508] the amino acid at Mutated site 5 is other than Phenylalanine (or Methionine, or Tyrosine, or Leucine, as the case may be according to Table 2a),

[0509] In particularly preferred embodiment, the mutated PPO comprises a sequence of SEQ ID NO: 1, 2, 3, 4, 5, 6, 7, 8, 9, 10, 11, 12, 13, 14, 15, 16, 17, 18, 19, 20, 21, 22, 23, 24, 25, 26, 27, 28, 29, 30, 31, 32, 33, 34, 35, 36, 37, 38, 39, 40, 41, 42, 43, 44, 45, 46, 47, 48, 49, 50, 51, 52, 53, 54, 55, 56, 57, 58, 59, 60, 61, 62, 63, 64, 65, 66, 67, 68, 69, 70, 71, 72, 73, 74, 75, 76, 77, 78, 79, 80, 81, 82, 83, 84, 85, 86, 87, 88, 89, 90, 91, 92, 93, 94, 95, 96, 97, 98, 99, 100, 101, 102, 103, 104, 105, 106, 107, 108, 109, 110, 111, 112, 113, 114, 115, 116, 117, 118, 119, 120, 121, 122, 123, 124, 125, 126, 127, 128, 129, 130, 131, 132, 133, 134, 135, 136, 137, 138, 139, 140, 141, 142, 143, 144, 145, 146, 147, 148, 149, 150, 151, 152, 153, 154, 155, 156, 157, 158, 159, 160, 161, 162, 163, 164, 165, 166, 167, 168, 169, 170, 171, 172, 173, 174, 175, 176, 177, 178, 179, 180, 181, 182, 183, 184, 185, 186, 187, 188, 189, 190, 191, 192, 193, 194, 195, 196, 197, 198, 199, 200, 201, 202, 203, 204, 205, 206, 207, 208, 209, 210, 211, 212, 213, 214, 215, 216, 217, 218, 219, 220, 221, 222, 223, 224, 225, 226, 227, 228, 229, 230, 231, 232, 233, 234, 235, 236, 237, 238, 239, 240, 241, 242, 243, 244, 245, 246, 247, 248, 249, 250, 251, 252, 253, 254, 255, 256, 257, 258, 259, 260, 261, 262, 263, 264, 265, 266, 267, 268, 269, 270, 271, 272, 273, 274, 275, 276, 277, 278, 279, 280, 281, 282, 283, 284, 285, 286, 287, 288, 289, 290, 291, 292, 293, 294, 295, 296, 297, 298, 299, 300, 301, 312, or 313, a variant, derivative, orthologue, paralogue or homologue thereof, in which:

[0510] the amino acid at Mutated site 4 (which corresponds to Leu397 of SEQ ID NO: 1) is Ala, Arg, Val, Ile, Met, His, Lys, Asp, Glu, Ser, Thr, Asn, Gln, Cys, Gly, Pro, Phe, Tyr, or Trp, and the amino acid at Mutated site 5 (which corresponds to Phe420 of SEQ ID NO: 1) is Ala, Leu, Val, Ile, Met, His, Lys, Asp, Glu, Ser, Thr, Asn, Gln, Cys, Gly, Pro, Arg, Tyr, or Trp.

[0511] In another preferred embodiment, the mutated PPO comprises a sequence of SEQ ID NO: 1, 2, 3, 4, 5, 6, 7, 8, 9, 10, 11, 12, 13, 14, 15, 16, 17, 18, 19, 20, 21, 22, 23, 24, 25, 26, 27, 28, 29, 30, 31, 32, 33, 34, 35, 36, 37, 38, 39, 40, 41, 42, 43, 44, 45, 46, 47, 48, 49, 50, 51, 52, 53, 54, 55, 56, 57, 58, 59, 60, 61, 62, 63, 64, 65, 66, 67, 68, 69, 70, 71, 72, 73, 74, 75, 76, 77, 78, 79, 80, 81, 82, 83, 84, 85, 86, 87, 88, 89, 90, 91, 92, 93, 94, 95, 96, 97, 98, 99, 100, 101, 102, 103, 104, 105, 106, 107, 108, 109, 110, 111, 112, 113, 114, 115, 116, 117, 118, 119, 120, 121, 122, 123, 124, 125, 126, 127, 128, 129, 130, 131, 132, 133, 134, 135, 136, 137, 138, 139, 140, 141, 142, 143, 144, 145, 146, 147, 148, 149, 150, 151, 152, 153, 154, 155, 156, 157, 158, 159, 160, 161, 162, 163, 164, 165, 166, 167, 168, 169, 170, 171, 172, 173, 174, 175, 176, 177, 178, 179, 180, 181, 182, 183, 184, 185, 186, 187, 188, 189, 190, 191, 192, 193, 194, 195, 196, 197, 198, 199, 200, 201, 202, 203, 204, 205, 206, 207, 208, 209, 210, 211, 212, 213, 214, 215, 216, 217, 218, 219, 220, 221, 222, 223, 224, 225, 226, 227, 228, 229, 230, 231, 232, 233, 234, 235, 236, 237, 238, 239, 240, 241, 242, 243, 244, 245, 246, 247, 248, 249, 250, 251, 252, 253, 254, 255, 256, 257, 258, 259, 260, 261, 262, 263, 264, 265, 266, 267, 268, 269, 270, 271, 272, 273, 274, 275, 276, 277, 278, 279, 280, 281, 282, 283, 284, 285, 286, 287, 288, 289, 290, 291, 292, 293, 294, 295, 296, 297, 298, 299, 300, 301, 312, or 313, a variant, derivative, orthologue, paralogue or homologue thereof, in which:

[0512] the amino acid at Mutated site 4 is Ala, and the amino acid at Mutated site 5 is Ala.

[0513] In another preferred embodiment, the mutated PPO comprises a sequence of SEQ ID NO: 1, 2, 3, 4, 5, 6, 7, 8, 9, 10, 11, 12, 13, 14, 15, 16, 17, 18, 19, 20, 21, 22, 23, 24, 25, 26, 27, 28, 29, 30, 31, 32, 33, 34, 35, 36, 37, 38, 39, 40, 41, 42, 43, 44, 45, 46, 47, 48, 49, 50, 51, 52, 53, 54, 55, 56, 57, 58, 59, 60, 61, 62, 63, 64, 65, 66, 67, 68, 69, 70, 71, 72, 73, 74, 75, 76, 77, 78, 79, 80, 81, 82, 83, 84, 85, 86, 87, 88, 89, 90, 91, 92, 93, 94, 95, 96, 97, 98, 99, 100, 101, 102, 103, 104, 105, 106, 107, 108, 109, 110, 111, 112, 113, 114, 115, 116, 117, 118, 119, 120, 121, 122, 123, 124, 125, 126, 127, 128, 129, 130, 131, 132, 133, 134, 135, 136, 137, 138, 139, 140, 141, 142, 143, 144, 145, 146, 147, 148, 149, 150, 151, 152, 153, 154, 155, 156, 157, 158, 159, 160, 161, 162, 163, 164, 165, 166, 167, 168, 169, 170, 171, 172, 173, 174, 175, 176, 177, 178, 179, 180, 181, 182, 183, 184, 185, 186, 187, 188, 189, 190, 191, 192, 193, 194, 195, 196, 197, 198, 199, 200, 201, 202, 203, 204, 205, 206, 207, 208, 209, 210, 211, 212, 213, 214, 215, 216, 217, 218, 219, 220, 221, 222, 223, 224, 225, 226, 227, 228, 229, 230, 231, 232, 233, 234, 235, 236, 237, 238, 239, 240, 241, 242, 243, 244, 245, 246, 247, 248, 249, 250, 251, 252, 253, 254, 255, 256, 257, 258, 259, 260, 261, 262, 263, 264, 265, 266, 267, 268, 269, 270, 271, 272, 273, 274, 275, 276, 277, 278, 279, 280, 281, 282, 283, 284, 285, 286, 287, 288, 289, 290, 291, 292, 293, 294, 295, 296, 297, 298, 299, 300, 301, 312, or 313, a variant, derivative, orthologue, paralogue or homologue thereof, in which:

[0514] the amino acid at Mutated site 4 is Ala, and the amino acid at Mutated site 5 is Leu.

[0515] In another preferred embodiment, the mutated PPO comprises a sequence of SEQ ID NO: 1, 2, 3, 4, 5, 6, 7, 8, 9, 10, 11, 12, 13, 14, 15, 16, 17, 18, 19, 20, 21, 22, 23, 24, 25, 26, 27, 28, 29, 30, 31, 32, 33, 34, 35, 36, 37, 38, 39, 40, 41, 42, 43, 44, 45, 46, 47, 48, 49, 50, 51, 52, 53, 54, 55, 56, 57, 58, 59, 60, 61, 62, 63, 64, 65, 66, 67, 68, 69, 70, 71, 72, 73, 74, 75, 76, 77, 78, 79, 80, 81, 82, 83, 84, 85, 86, 87, 88, 89, 90, 91, 92, 93, 94, 95, 96, 97, 98, 99, 100, 101, 102, 103, 104, 105, 106, 107, 108, 109, 110, 111, 112, 113, 114, 115, 116, 117, 118, 119, 120, 121, 122, 123, 124, 125, 126, 127, 128, 129, 130, 131, 132, 133, 134, 135, 136, 137, 138, 139, 140, 141, 142, 143, 144, 145, 146, 147, 148, 149, 150, 151, 152, 153, 154, 155, 156, 157, 158, 159, 160, 161, 162, 163, 164, 165, 166, 167, 168, 169, 170, 171, 172, 173, 174, 175, 176, 177, 178, 179, 180, 181, 182, 183, 184, 185, 186, 187, 188, 189, 190, 191, 192, 193, 194, 195, 196, 197, 198, 199, 200, 201, 202, 203, 204, 205, 206, 207, 208, 209, 210, 211, 212, 213, 214, 215, 216, 217, 218, 219, 220, 221, 222, 223, 224, 225, 226, 227, 228, 229, 230, 231, 232, 233, 234, 235, 236, 237, 238, 239, 240, 241, 242, 243, 244, 245, 246, 247, 248, 249, 250, 251, 252, 253, 254, 255, 256, 257, 258, 259, 260, 261, 262, 263, 264, 265, 266, 267, 268, 269, 270, 271, 272, 273, 274, 275, 276, 277, 278, 279, 280, 281, 282, 283, 284, 285, 286, 287, 288, 289, 290, 291, 292, 293, 294, 295, 296, 297, 298, 299, 300, 301, 312, or 313, a variant, derivative, orthologue, paralogue or homologue thereof, in which:

[0516] the amino acid at Mutated site 4 is Ala, and the amino acid at Mutated site 5 is Val.

[0517] In another preferred embodiment, the mutated PPO comprises a sequence of SEQ ID NO: 1, 2, 3, 4, 5, 6, 7, 8, 9, 10, 11, 12, 13, 14, 15, 16, 17, 18, 19, 20, 21, 22, 23, 24, 25, 26, 27, 28, 29, 30, 31, 32, 33, 34, 35, 36, 37, 38, 39, 40, 41, 42, 43, 44, 45, 46, 47, 48, 49, 50, 51, 52, 53, 54, 55, 56, 57, 58, 59, 60, 61, 62, 63, 64, 65, 66, 67, 68, 69, 70, 71, 72, 73, 74, 75, 76, 77, 78, 79, 80, 81, 82, 83, 84, 85, 86, 87, 88, 89, 90, 91, 92, 93, 94, 95, 96, 97, 98, 99, 100, 101, 102, 103, 104, 105, 106, 107, 108, 109, 110, 111, 112, 113, 114, 115, 116, 117, 118, 119, 120, 121, 122, 123, 124, 125, 126, 127, 128, 129, 130, 131, 132, 133, 134, 135, 136, 137, 138, 139, 140, 141, 142, 143, 144, 145, 146, 147, 148, 149, 150, 151, 152, 153, 154, 155, 156, 157, 158, 159, 160, 161, 162, 163, 164, 165, 166, 167, 168, 169, 170, 171, 172, 173, 174, 175, 176, 177, 178, 179, 180, 181, 182, 183, 184, 185, 186, 187, 188, 189, 190, 191, 192, 193, 194, 195, 196, 197, 198, 199, 200, 201, 202, 203, 204, 205, 206, 207, 208, 209, 210, 211, 212, 213, 214, 215, 216, 217, 218, 219, 220, 221, 222, 223, 224, 225, 226, 227, 228, 229, 230, 231, 232, 233, 234, 235, 236, 237, 238, 239, 240, 241, 242, 243, 244, 245, 246, 247, 248, 249, 250, 251, 252, 253, 254, 255, 256, 257, 258, 259, 260, 261, 262, 263, 264, 265, 266, 267, 268, 269, 270, 271, 272, 273, 274, 275, 276, 277, 278, 279, 280, 281, 282, 283, 284, 285, 286, 287, 288, 289, 290, 291, 292, 293, 294, 295, 296, 297, 298, 299, 300, 301, 312, or 313, a variant, derivative, orthologue, paralogue or homologue thereof, in which:

[0518] the amino acid at Mutated site 4 is Ala, and the amino acid at Mutated site 5 is Ile.

[0519] In another preferred embodiment, the mutated PPO comprises a sequence of SEQ ID NO: 1, 2, 3, 4, 5, 6, 7, 8, 9, 10, 11, 12, 13, 14, 15, 16, 17, 18, 19, 20, 21, 22, 23, 24, 25, 26, 27, 28, 29, 30, 31, 32, 33, 34, 35, 36, 37, 38, 39, 40, 41, 42, 43, 44, 45, 46, 47, 48, 49, 50, 51, 52, 53, 54, 55, 56, 57, 58, 59, 60, 61, 62, 63, 64, 65, 66, 67, 68, 69, 70, 71, 72, 73, 74, 75, 76, 77, 78, 79, 80, 81, 82, 83, 84, 85, 86, 87, 88, 89, 90, 91, 92, 93, 94, 95, 96, 97, 98, 99, 100, 101, 102, 103, 104, 105, 106, 107, 108, 109, 110, 111, 112, 113, 114, 115, 116, 117, 118, 119, 120, 121, 122, 123, 124, 125, 126, 127, 128, 129, 130, 131, 132, 133, 134, 135, 136, 137, 138, 139, 140, 141, 142, 143, 144, 145, 146, 147, 148, 149, 150, 151, 152, 153, 154, 155, 156, 157, 158, 159, 160, 161, 162, 163, 164, 165, 166, 167, 168, 169, 170, 171, 172, 173, 174, 175, 176, 177, 178, 179, 180, 181, 182, 183, 184, 185, 186, 187, 188, 189, 190, 191, 192, 193, 194, 195, 196, 197, 198, 199, 200, 201, 202, 203, 204, 205, 206, 207, 208, 209, 210, 211, 212, 213, 214, 215, 216, 217, 218, 219, 220, 221, 222, 223, 224, 225, 226, 227, 228, 229, 230, 231, 232, 233, 234, 235, 236, 237, 238, 239, 240, 241, 242, 243, 244, 245, 246, 247, 248, 249, 250, 251, 252, 253, 254, 255, 256, 257, 258, 259, 260, 261, 262, 263, 264, 265, 266, 267, 268, 269, 270, 271, 272, 273, 274, 275, 276, 277, 278, 279, 280, 281, 282, 283, 284, 285, 286, 287, 288, 289, 290, 291, 292, 293, 294, 295, 296, 297, 298, 299, 300, 301, 312, or 313, a variant, derivative, orthologue, paralogue or homologue thereof, in which:

[0520] the amino acid at Mutated site 4 is Ala, and the amino acid at Mutated site 5 is Met.

[0521] In another preferred embodiment, the mutated PPO comprises a sequence of SEQ ID NO: 1, 2, 3, 4, 5, 6, 7, 8, 9, 10, 11, 12, 13, 14, 15, 16, 17, 18, 19, 20, 21, 22, 23, 24, 25, 26, 27, 28, 29, 30, 31, 32, 33, 34, 35, 36, 37, 38, 39, 40, 41, 42, 43, 44, 45, 46, 47, 48, 49, 50, 51, 52, 53, 54, 55, 56, 57, 58, 59, 60, 61, 62, 63, 64, 65, 66, 67, 68, 69, 70, 71, 72, 73, 74, 75, 76, 77, 78, 79, 80, 81, 82, 83, 84, 85, 86, 87, 88, 89, 90, 91, 92, 93, 94, 95, 96, 97, 98, 99, 100, 101, 102, 103, 104, 105, 106, 107, 108, 109, 110, 111, 112, 113, 114, 115, 116, 117, 118, 119, 120, 121, 122, 123, 124, 125, 126, 127, 128, 129, 130, 131, 132, 133, 134, 135, 136, 137, 138, 139, 140, 141, 142, 143, 144, 145, 146, 147, 148, 149, 150, 151, 152, 153, 154, 155, 156, 157, 158, 159, 160, 161, 162, 163, 164, 165, 166, 167, 168, 169, 170, 171, 172, 173, 174, 175, 176, 177, 178, 179, 180, 181, 182, 183, 184, 185, 186, 187, 188, 189, 190, 191, 192, 193, 194, 195, 196, 197, 198, 199, 200, 201, 202, 203, 204, 205, 206, 207, 208, 209, 210, 211, 212, 213, 214, 215, 216, 217, 218, 219, 220, 221, 222, 223, 224, 225, 226, 227, 228, 229, 230, 231, 232, 233, 234, 235, 236, 237, 238, 239, 240, 241, 242, 243, 244, 245, 246, 247, 248, 249, 250, 251, 252, 253, 254, 255, 256, 257, 258, 259, 260, 261, 262, 263, 264, 265, 266, 267, 268, 269, 270, 271, 272, 273, 274, 275, 276, 277, 278, 279, 280, 281, 282, 283, 284, 285, 286, 287, 288, 289, 290, 291, 292, 293, 294, 295, 296, 297, 298, 299, 300, 301, 312, or 313, a variant, derivative, orthologue, paralogue or homologue thereof, in which:

[0522] the amino acid at Mutated site 4 is Ala, and the amino acid at Mutated site 5 is His.

[0523] In another preferred embodiment, the mutated PPO comprises a sequence of SEQ ID NO: 1, 2, 3, 4, 5, 6, 7, 8, 9, 10, 11, 12, 13, 14, 15, 16, 17, 18, 19, 20, 21, 22, 23, 24, 25, 26, 27, 28, 29, 30, 31, 32, 33, 34, 35, 36, 37, 38, 39, 40, 41, 42, 43, 44, 45, 46, 47, 48, 49, 50, 51, 52, 53, 54, 55, 56, 57, 58, 59, 60, 61, 62, 63, 64, 65, 66, 67, 68, 69, 70, 71, 72, 73, 74, 75, 76, 77, 78, 79, 80, 81, 82, 83, 84, 85, 86, 87, 88, 89, 90, 91, 92, 93, 94, 95, 96, 97, 98, 99, 100, 101, 102, 103, 104, 105, 106, 107, 108, 109, 110, 111, 112, 113, 114, 115, 116, 117, 118, 119, 120, 121, 122, 123, 124, 125, 126, 127, 128, 129, 130, 131, 132, 133, 134, 135, 136, 137, 138, 139, 140, 141, 142, 143, 144, 145, 146, 147, 148, 149, 150, 151, 152, 153, 154, 155, 156, 157, 158, 159, 160, 161, 162, 163, 164, 165, 166, 167, 168, 169, 170, 171, 172, 173, 174, 175, 176, 177, 178, 179, 180, 181, 182, 183, 184, 185, 186, 187, 188, 189, 190, 191, 192, 193, 194, 195, 196, 197, 198, 199, 200, 201, 202, 203, 204, 205, 206, 207, 208, 209, 210, 211, 212, 213, 214, 215, 216, 217, 218, 219, 220, 221, 222, 223, 224, 225, 226, 227, 228, 229, 230, 231, 232, 233, 234, 235, 236, 237, 238, 239, 240, 241, 242, 243, 244, 245, 246, 247, 248, 249, 250, 251, 252, 253, 254, 255, 256, 257, 258, 259, 260, 261, 262, 263, 264, 265, 266, 267, 268, 269, 270, 271, 272, 273, 274, 275, 276, 277, 278, 279, 280, 281, 282, 283, 284, 285, 286, 287, 288, 289, 290, 291, 292, 293, 294, 295, 296, 297, 298, 299, 300, 301, 312, or 313, a variant, derivative, orthologue, paralogue or homologue thereof, in which:

[0524] the amino acid at Mutated site 4 is Ala, and the amino acid at Mutated site 5 is Lys.

[0525] In another preferred embodiment, the mutated PPO comprises a sequence of SEQ ID NO: 1, 2, 3, 4, 5, 6, 7, 8, 9, 10, 11, 12, 13, 14, 15, 16, 17, 18, 19, 20, 21, 22, 23, 24, 25, 26, 27, 28, 29, 30, 31, 32, 33, 34, 35, 36, 37, 38, 39, 40, 41, 42, 43, 44, 45, 46, 47, 48, 49, 50, 51, 52, 53, 54, 55, 56, 57, 58, 59, 60, 61, 62, 63, 64, 65, 66, 67, 68, 69, 70, 71, 72, 73, 74, 75, 76, 77, 78, 79, 80, 81, 82, 83, 84, 85, 86, 87, 88, 89, 90, 91, 92, 93, 94, 95, 96, 97, 98, 99, 100, 101, 102, 103, 104, 105, 106, 107, 108, 109, 110, 111, 112, 113, 114, 115, 116, 117, 118, 119, 120, 121, 122, 123, 124, 125, 126, 127, 128, 129, 130, 131, 132, 133, 134, 135, 136, 137, 138, 139, 140, 141, 142, 143, 144, 145, 146, 147, 148, 149, 150, 151, 152, 153, 154, 155, 156, 157, 158, 159, 160, 161, 162, 163, 164, 165, 166, 167, 168, 169, 170, 171, 172, 173, 174, 175, 176, 177, 178, 179, 180, 181, 182, 183, 184, 185, 186, 187, 188, 189, 190, 191, 192, 193, 194, 195, 196, 197, 198, 199, 200, 201, 202, 203, 204, 205, 206, 207, 208, 209, 210, 211, 212, 213, 214, 215, 216, 217, 218, 219, 220, 221, 222, 223, 224, 225, 226, 227, 228, 229, 230, 231, 232, 233, 234, 235, 236, 237, 238, 239, 240, 241, 242, 243, 244, 245, 246, 247, 248, 249, 250, 251, 252, 253, 254, 255, 256, 257, 258, 259, 260, 261, 262, 263, 264, 265, 266, 267, 268, 269, 270, 271, 272, 273, 274, 275, 276, 277, 278, 279, 280, 281, 282, 283, 284, 285, 286, 287, 288, 289, 290, 291, 292, 293, 294, 295, 296, 297, 298, 299, 300, 301, 312, or 313, a variant, derivative, orthologue, paralogue or homologue thereof, in which:

[0526] the amino acid at Mutated site 4 is Ala, and the amino acid at Mutated site 5 is Asp.

[0527] In another preferred embodiment, the mutated PPO comprises a sequence of SEQ ID NO: 1, 2, 3, 4, 5, 6, 7, 8, 9, 10, 11, 12, 13, 14, 15, 16, 17, 18, 19, 20, 21, 22, 23, 24, 25, 26, 27, 28, 29, 30, 31, 32, 33, 34, 35, 36, 37, 38, 39, 40, 41, 42, 43, 44, 45, 46, 47, 48, 49, 50, 51, 52, 53, 54, 55, 56, 57, 58, 59, 60, 61, 62, 63, 64, 65, 66, 67, 68, 69, 70, 71, 72, 73, 74, 75, 76, 77, 78, 79, 80, 81, 82, 83, 84, 85, 86, 87, 88, 89, 90, 91, 92, 93, 94, 95, 96, 97, 98, 99, 100, 101, 102, 103, 104, 105, 106, 107, 108, 109, 110, 111, 112, 113, 114, 115, 116, 117, 118, 119, 120, 121, 122, 123, 124, 125, 126, 127, 128, 129, 130, 131, 132, 133, 134, 135, 136, 137, 138, 139, 140, 141, 142, 143, 144, 145, 146, 147, 148, 149, 150, 151, 152, 153, 154, 155, 156, 157, 158, 159, 160, 161, 162, 163, 164, 165, 166, 167, 168, 169, 170, 171, 172, 173, 174, 175, 176, 177, 178, 179, 180, 181, 182, 183, 184, 185, 186, 187, 188, 189, 190, 191, 192, 193, 194, 195, 196, 197, 198, 199, 200, 201, 202, 203, 204, 205, 206, 207, 208, 209, 210, 211, 212, 213, 214, 215, 216, 217, 218, 219, 220, 221, 222, 223, 224, 225, 226, 227, 228, 229, 230, 231, 232, 233, 234, 235, 236, 237, 238, 239, 240, 241, 242, 243, 244, 245, 246, 247, 248, 249, 250, 251, 252, 253, 254, 255, 256, 257, 258, 259, 260, 261, 262, 263, 264, 265, 266, 267, 268, 269, 270, 271, 272, 273, 274, 275, 276, 277, 278, 279, 280, 281, 282, 283, 284, 285, 286, 287, 288, 289, 290, 291, 292, 293, 294, 295, 296, 297, 298, 299, 300, 301, 312, or 313, a variant, derivative, orthologue, paralogue or homologue thereof, in which:

[0528] the amino acid at Mutated site 4 is Ala, and the amino acid at Mutated site 5 is Glu.

[0529] In another preferred embodiment, the mutated PPO comprises a sequence of SEQ ID NO: 1, 2, 3, 4, 5, 6, 7, 8, 9, 10, 11, 12, 13, 14, 15, 16, 17, 18, 19, 20, 21, 22, 23, 24, 25, 26, 27, 28, 29, 30, 31, 32, 33, 34, 35, 36, 37, 38, 39, 40, 41, 42, 43, 44, 45, 46, 47, 48, 49, 50, 51, 52, 53, 54, 55, 56, 57, 58, 59, 60, 61, 62, 63, 64, 65, 66, 67, 68, 69, 70, 71, 72, 73, 74, 75, 76, 77, 78, 79, 80, 81, 82, 83, 84, 85, 86, 87, 88, 89, 90, 91, 92, 93, 94, 95, 96, 97, 98, 99, 100, 101, 102, 103, 104, 105, 106, 107, 108, 109, 110, 111, 112, 113, 114, 115, 116, 117, 118, 119, 120, 121, 122, 123, 124, 125, 126, 127, 128, 129, 130, 131, 132, 133, 134, 135, 136, 137, 138, 139, 140, 141, 142, 143, 144, 145, 146, 147, 148, 149, 150, 151, 152, 153, 154, 155, 156, 157, 158, 159, 160, 161, 162, 163, 164, 165, 166, 167, 168, 169, 170, 171, 172, 173, 174, 175, 176, 177, 178, 179, 180, 181, 182, 183, 184, 185, 186, 187, 188, 189, 190, 191, 192, 193, 194, 195, 196, 197, 198, 199, 200, 201, 202, 203, 204, 205, 206, 207, 208, 209, 210, 211, 212, 213, 214, 215, 216, 217, 218, 219, 220, 221, 222, 223, 224, 225, 226, 227, 228, 229, 230, 231, 232, 233, 234, 235, 236, 237, 238, 239, 240, 241, 242, 243, 244, 245, 246, 247, 248, 249, 250, 251, 252, 253, 254, 255, 256, 257, 258, 259, 260, 261, 262, 263, 264, 265, 266, 267, 268, 269, 270, 271, 272, 273, 274, 275, 276, 277, 278, 279, 280, 281, 282, 283, 284, 285, 286, 287, 288, 289, 290, 291, 292, 293, 294, 295, 296, 297, 298, 299, 300, 301, 312, or 313, a variant, derivative, orthologue, paralogue or homologue thereof, in which:

[0530] the amino acid at Mutated site 4 is Ala, and the amino acid at Mutated site 5 is Ser.

[0531] In another preferred embodiment, the mutated PPO comprises a sequence of SEQ ID NO: 1, 2, 3, 4, 5, 6, 7, 8, 9, 10, 11, 12, 13, 14, 15, 16, 17, 18, 19, 20, 21, 22, 23, 24, 25, 26, 27, 28, 29, 30, 31, 32, 33, 34, 35, 36, 37, 38, 39, 40, 41, 42, 43, 44, 45, 46, 47, 48, 49, 50, 51, 52, 53, 54, 55, 56, 57, 58, 59, 60, 61, 62, 63, 64, 65, 66, 67, 68, 69, 70, 71, 72, 73, 74, 75, 76, 77, 78, 79, 80, 81, 82, 83, 84, 85, 86, 87, 88, 89, 90, 91, 92, 93, 94, 95, 96, 97, 98, 99, 100, 101, 102, 103, 104, 105, 106, 107, 108, 109, 110, 111, 112, 113, 114, 115, 116, 117, 118, 119, 120, 121, 122, 123, 124, 125, 126, 127, 128, 129, 130, 131, 132, 133, 134, 135, 136, 137, 138, 139, 140, 141, 142, 143, 144, 145, 146, 147, 148, 149, 150, 151, 152, 153, 154, 155, 156, 157, 158, 159, 160, 161, 162, 163, 164, 165, 166, 167, 168, 169, 170, 171, 172, 173, 174, 175, 176, 177, 178, 179, 180, 181, 182, 183, 184, 185, 186, 187, 188, 189, 190, 191, 192, 193, 194, 195, 196, 197, 198, 199, 200, 201, 202, 203, 204, 205, 206, 207, 208, 209, 210, 211, 212, 213, 214, 215, 216, 217, 218, 219, 220, 221, 222, 223, 224, 225, 226, 227, 228, 229, 230, 231, 232, 233, 234, 235, 236, 237, 238, 239, 240, 241, 242, 243, 244, 245, 246, 247, 248, 249, 250, 251, 252, 253, 254, 255, 256, 257, 258, 259, 260, 261, 262, 263, 264, 265, 266, 267, 268, 269, 270, 271, 272, 273, 274, 275, 276, 277, 278, 279, 280, 281, 282, 283, 284, 285, 286, 287, 288, 289, 290, 291, 292, 293, 294, 295, 296, 297, 298, 299, 300, 301, 312, or 313, a variant, derivative, orthologue, paralogue or homologue thereof, in which:

[0532] the amino acid at Mutated site 4 is Ala, and the amino acid at Mutated site 5 is Thr.

[0533] In another preferred embodiment, the mutated PPO comprises a sequence of SEQ ID NO: 1, 2, 3, 4, 5, 6, 7, 8, 9, 10, 11, 12, 13, 14, 15, 16, 17, 18, 19, 20, 21, 22, 23, 24, 25, 26, 27, 28, 29, 30, 31, 32, 33, 34, 35, 36, 37, 38, 39, 40, 41, 42, 43, 44, 45, 46, 47, 48, 49, 50, 51, 52, 53, 54, 55, 56, 57, 58, 59, 60, 61, 62, 63, 64, 65, 66, 67, 68, 69, 70, 71, 72, 73, 74, 75, 76, 77, 78, 79, 80, 81, 82, 83, 84, 85, 86, 87, 88, 89, 90, 91, 92, 93, 94, 95, 96, 97, 98, 99, 100, 101, 102, 103, 104, 105, 106, 107, 108, 109, 110, 111, 112, 113, 114, 115, 116, 117, 118, 119, 120, 121, 122, 123, 124, 125, 126, 127, 128, 129, 130, 131, 132, 133, 134, 135, 136, 137, 138, 139, 140, 141, 142, 143, 144, 145, 146, 147, 148, 149, 150, 151, 152, 153, 154, 155, 156, 157, 158, 159, 160, 161, 162, 163, 164, 165, 166, 167, 168, 169, 170, 171, 172, 173, 174, 175, 176, 177, 178, 179, 180, 181, 182, 183, 184, 185, 186, 187, 188, 189, 190, 191, 192, 193, 194, 195, 196, 197, 198, 199, 200, 201, 202, 203, 204, 205, 206, 207, 208, 209, 210, 211, 212, 213, 214, 215, 216, 217, 218, 219, 220, 221, 222, 223, 224, 225, 226, 227, 228, 229, 230, 231, 232, 233, 234, 235, 236, 237, 238, 239, 240, 241, 242, 243, 244, 245, 246, 247, 248, 249, 250, 251, 252, 253, 254, 255, 256, 257, 258, 259, 260, 261, 262, 263, 264, 265, 266, 267, 268, 269, 270, 271, 272, 273, 274, 275, 276, 277, 278, 279, 280, 281, 282, 283, 284, 285, 286, 287, 288, 289, 290, 291, 292, 293, 294, 295, 296, 297, 298, 299, 300, 301, 312, or 313, a variant, derivative, orthologue, paralogue or homologue thereof, in which:

[0534] the amino acid at Mutated site 4 is Ala, and the amino acid at Mutated site 5 is Asn.

[0535] In another preferred embodiment, the mutated PPO comprises a sequence of SEQ ID NO: 1, 2, 3, 4, 5, 6, 7, 8, 9, 10, 11, 12, 13, 14, 15, 16, 17, 18, 19, 20, 21, 22, 23, 24, 25, 26, 27, 28, 29, 30, 31, 32, 33, 34, 35, 36, 37, 38, 39, 40, 41, 42, 43, 44, 45, 46, 47, 48, 49, 50, 51, 52, 53, 54, 55, 56, 57, 58, 59, 60, 61, 62, 63, 64, 65, 66, 67, 68, 69, 70, 71, 72, 73, 74, 75, 76, 77, 78, 79, 80, 81, 82, 83, 84, 85, 86, 87, 88, 89, 90, 91, 92, 93, 94, 95, 96, 97, 98, 99, 100, 101, 102, 103, 104, 105, 106, 107, 108, 109, 110, 111, 112, 113, 114, 115, 116, 117, 118, 119, 120, 121, 122, 123, 124, 125, 126, 127, 128, 129, 130, 131, 132, 133, 134, 135, 136, 137, 138, 139, 140, 141, 142, 143, 144, 145, 146, 147, 148, 149, 150, 151, 152, 153, 154, 155, 156, 157, 158, 159, 160, 161, 162, 163, 164, 165, 166, 167, 168, 169, 170, 171, 172, 173, 174, 175, 176, 177, 178, 179, 180, 181, 182, 183, 184, 185, 186, 187, 188, 189, 190, 191, 192, 193, 194, 195, 196, 197, 198, 199, 200, 201, 202, 203, 204, 205, 206, 207, 208, 209, 210, 211, 212, 213, 214, 215, 216, 217, 218, 219, 220, 221, 222, 223, 224, 225, 226, 227, 228, 229, 230, 231, 232, 233, 234, 235, 236, 237, 238, 239, 240, 241, 242, 243, 244, 245, 246, 247, 248, 249, 250, 251, 252, 253, 254, 255, 256, 257, 258, 259, 260, 261, 262, 263, 264, 265, 266, 267, 268, 269, 270, 271, 272, 273, 274, 275, 276, 277, 278, 279, 280, 281, 282, 283, 284, 285, 286, 287, 288, 289, 290, 291, 292, 293, 294, 295, 296, 297, 298, 299, 300, 301, 312, or 313, a variant, derivative, orthologue, paralogue or homologue thereof, in which:

[0536] the amino acid at Mutated site 4 is Ala, and the amino acid at Mutated site 5 is Gln.

[0537] In another preferred embodiment, the mutated PPO comprises a sequence of SEQ ID NO: 1, 2, 3, 4, 5, 6, 7, 8, 9, 10, 11, 12, 13, 14, 15, 16, 17, 18, 19, 20, 21, 22, 23, 24, 25, 26, 27, 28, 29, 30, 31, 32, 33, 34, 35, 36, 37, 38, 39, 40, 41, 42, 43, 44, 45, 46, 47, 48, 49, 50, 51, 52, 53, 54, 55, 56, 57, 58, 59, 60, 61, 62, 63, 64, 65, 66, 67, 68, 69, 70, 71, 72, 73, 74, 75, 76, 77, 78, 79, 80, 81, 82, 83, 84, 85, 86, 87, 88, 89, 90, 91, 92, 93, 94, 95, 96, 97, 98, 99, 100, 101, 102, 103, 104, 105, 106, 107, 108, 109, 110, 111, 112, 113, 114, 115, 116, 117, 118, 119, 120, 121, 122, 123, 124, 125, 126, 127, 128, 129, 130, 131, 132, 133, 134, 135, 136, 137, 138, 139, 140, 141, 142, 143, 144, 145, 146, 147, 148, 149, 150, 151, 152, 153, 154, 155, 156, 157, 158, 159, 160, 161, 162, 163, 164, 165, 166, 167, 168, 169, 170, 171, 172, 173, 174, 175, 176, 177, 178, 179, 180, 181, 182, 183, 184, 185, 186, 187, 188, 189, 190, 191, 192, 193, 194, 195, 196, 197, 198, 199, 200, 201, 202, 203, 204, 205, 206, 207, 208, 209, 210, 211, 212, 213, 214, 215, 216, 217, 218, 219, 220, 221, 222, 223, 224, 225, 226, 227, 228, 229, 230, 231, 232, 233, 234, 235, 236, 237, 238, 239, 240, 241, 242, 243, 244, 245, 246, 247, 248, 249, 250, 251, 252, 253, 254, 255, 256, 257, 258, 259, 260, 261, 262, 263, 264, 265, 266, 267, 268, 269, 270, 271, 272, 273, 274, 275, 276, 277, 278, 279, 280, 281, 282, 283, 284, 285, 286, 287, 288, 289, 290, 291, 292, 293, 294, 295, 296, 297, 298, 299, 300, 301, 312, or 313, a variant, derivative, orthologue, paralogue or homologue thereof, in which:

[0538] the amino acid at Mutated site 4 is Ala, and the amino acid at Mutated site 5 is Cys.

[0539] In another preferred embodiment, the mutated PPO comprises a sequence of SEQ ID NO: 1, 2, 3, 4, 5, 6, 7, 8, 9, 10, 11, 12, 13, 14, 15, 16, 17, 18, 19, 20, 21, 22, 23, 24, 25, 26, 27, 28, 29, 30, 31, 32, 33, 34, 35, 36, 37, 38, 39, 40, 41, 42, 43, 44, 45, 46, 47, 48, 49, 50, 51, 52, 53, 54, 55, 56, 57, 58, 59, 60, 61, 62, 63, 64, 65, 66, 67, 68, 69, 70, 71, 72, 73, 74, 75, 76, 77, 78, 79, 80, 81, 82, 83, 84, 85, 86, 87, 88, 89, 90, 91, 92, 93, 94, 95, 96, 97, 98, 99, 100, 101, 102, 103, 104, 105, 106, 107, 108, 109, 110, 111, 112, 113, 114, 115, 116, 117, 118, 119, 120, 121, 122, 123, 124, 125, 126, 127, 128, 129, 130, 131, 132, 133, 134, 135, 136, 137, 138, 139, 140, 141, 142, 143, 144, 145, 146, 147, 148, 149, 150, 151, 152, 153, 154, 155, 156, 157, 158, 159, 160, 161, 162, 163, 164, 165, 166, 167, 168, 169, 170, 171, 172, 173, 174, 175, 176, 177, 178, 179, 180, 181, 182, 183, 184, 185, 186, 187, 188, 189, 190, 191, 192, 193, 194, 195, 196, 197, 198, 199, 200, 201, 202, 203, 204, 205, 206, 207, 208, 209, 210, 211, 212, 213, 214, 215, 216, 217, 218, 219, 220, 221, 222, 223, 224, 225, 226, 227, 228, 229, 230, 231, 232, 233, 234, 235, 236, 237, 238, 239, 240, 241, 242, 243, 244, 245, 246, 247, 248, 249, 250, 251, 252, 253, 254, 255, 256, 257, 258, 259, 260, 261, 262, 263, 264, 265, 266, 267, 268, 269, 270, 271, 272, 273, 274, 275, 276, 277, 278, 279, 280, 281, 282, 283, 284, 285, 286, 287, 288, 289, 290, 291, 292, 293, 294, 295, 296, 297, 298, 299, 300, 301, 312, or 313, a variant, derivative, orthologue, paralogue or homologue thereof, in which:

[0540] the amino acid at Mutated site 4 is Ala, and the amino acid at Mutated site 5 is Gly.

[0541] In another preferred embodiment, the mutated PPO comprises a sequence of SEQ ID NO: 1, 2, 3, 4, 5, 6, 7, 8, 9, 10, 11, 12, 13, 14, 15, 16, 17, 18, 19, 20, 21, 22, 23, 24, 25, 26, 27, 28, 29, 30, 31, 32, 33, 34, 35, 36, 37, 38, 39, 40, 41, 42, 43, 44, 45, 46, 47, 48, 49, 50, 51, 52, 53, 54, 55, 56, 57, 58, 59, 60, 61, 62, 63, 64, 65, 66, 67, 68, 69, 70, 71, 72, 73, 74, 75, 76, 77, 78, 79, 80, 81, 82, 83, 84, 85, 86, 87, 88, 89, 90, 91, 92, 93, 94, 95, 96, 97, 98, 99, 100, 101, 102, 103, 104, 105, 106, 107, 108, 109, 110, 111, 112, 113, 114, 115, 116, 117, 118, 119, 120, 121, 122, 123, 124, 125, 126, 127, 128, 129, 130, 131, 132, 133, 134, 135, 136, 137, 138, 139, 140, 141, 142, 143, 144, 145, 146, 147, 148, 149, 150, 151, 152, 153, 154, 155, 156, 157, 158, 159, 160, 161, 162, 163, 164, 165, 166, 167, 168, 169, 170, 171, 172, 173, 174, 175, 176, 177, 178, 179, 180, 181, 182, 183, 184, 185, 186, 187, 188, 189, 190, 191, 192, 193, 194, 195, 196, 197, 198, 199, 200, 201, 202, 203, 204, 205, 206, 207, 208, 209, 210, 211, 212, 213, 214, 215, 216, 217, 218, 219, 220, 221, 222, 223, 224, 225, 226, 227, 228, 229, 230, 231, 232, 233, 234, 235, 236, 237, 238, 239, 240, 241, 242, 243, 244, 245, 246, 247, 248, 249, 250, 251, 252, 253, 254, 255, 256, 257, 258, 259, 260, 261, 262, 263, 264, 265, 266, 267, 268, 269, 270, 271, 272, 273, 274, 275, 276, 277, 278, 279, 280, 281, 282, 283, 284, 285, 286, 287, 288, 289, 290, 291, 292, 293, 294, 295, 296, 297, 298, 299, 300, 301, 312, or 313, a variant, derivative, orthologue, paralogue or homologue thereof, in which:

[0542] the amino acid at Mutated site 4 is Ala, and the amino acid at Mutated site 5 is Pro.

[0543] In another preferred embodiment, the mutated PPO comprises a sequence of SEQ ID NO: 1, 2, 3, 4, 5, 6, 7, 8, 9, 10, 11, 12, 13, 14, 15, 16, 17, 18, 19, 20, 21, 22, 23, 24, 25, 26, 27, 28, 29, 30, 31, 32, 33, 34, 35, 36, 37, 38, 39, 40, 41, 42, 43, 44, 45, 46, 47, 48, 49, 50, 51, 52, 53, 54, 55, 56, 57, 58, 59, 60, 61, 62, 63, 64, 65, 66, 67, 68, 69, 70, 71, 72, 73, 74, 75, 76, 77, 78, 79, 80, 81, 82, 83, 84, 85, 86, 87, 88, 89, 90, 91, 92, 93, 94, 95, 96, 97, 98, 99, 100, 101, 102, 103, 104, 105, 106, 107, 108, 109, 110, 111, 112, 113, 114, 115, 116, 117, 118, 119, 120, 121, 122, 123, 124, 125, 126, 127, 128, 129, 130, 131, 132, 133, 134, 135, 136, 137, 138, 139, 140, 141, 142, 143, 144, 145, 146, 147, 148, 149, 150, 151, 152, 153, 154, 155, 156, 157, 158, 159, 160, 161, 162, 163, 164, 165, 166, 167, 168, 169, 170, 171, 172, 173, 174, 175, 176, 177, 178, 179, 180, 181, 182, 183, 184, 185, 186, 187, 188, 189, 190, 191, 192, 193, 194, 195, 196, 197, 198, 199, 200, 201, 202, 203, 204, 205, 206, 207, 208, 209, 210, 211, 212, 213, 214, 215, 216, 217, 218, 219, 220, 221, 222, 223, 224, 225, 226, 227, 228, 229, 230, 231, 232, 233, 234, 235, 236, 237, 238, 239, 240, 241, 242, 243, 244, 245, 246, 247, 248, 249, 250, 251, 252, 253, 254, 255, 256, 257, 258, 259, 260, 261, 262, 263, 264, 265, 266, 267, 268, 269, 270, 271, 272, 273, 274, 275, 276, 277, 278, 279, 280, 281, 282, 283, 284, 285, 286, 287, 288, 289, 290, 291, 292, 293, 294, 295, 296, 297, 298, 299, 300, 301, 312, or 313, a variant, derivative, orthologue, paralogue or homologue thereof, in which:

[0544] the amino acid at Mutated site 4 is Ala, and the amino acid at Mutated site 5 is Arg.

[0545] In another preferred embodiment, the mutated PPO comprises a sequence of SEQ ID NO: 1, 2, 3, 4, 5, 6, 7, 8, 9, 10, 11, 12, 13, 14, 15, 16, 17, 18, 19, 20, 21, 22, 23, 24, 25, 26, 27, 28, 29, 30, 31, 32, 33, 34, 35, 36, 37, 38, 39, 40, 41, 42, 43, 44, 45, 46, 47, 48, 49, 50, 51, 52, 53, 54, 55, 56, 57, 58, 59, 60, 61, 62, 63, 64, 65, 66, 67, 68, 69, 70, 71, 72, 73, 74, 75, 76, 77, 78, 79, 80, 81, 82, 83, 84, 85, 86, 87, 88, 89, 90, 91, 92, 93, 94, 95, 96, 97, 98, 99, 100, 101, 102, 103, 104, 105, 106, 107, 108, 109, 110, 111, 112, 113, 114, 115, 116, 117, 118, 119, 120, 121, 122, 123, 124, 125, 126, 127, 128, 129, 130, 131, 132, 133, 134, 135, 136, 137, 138, 139, 140, 141, 142, 143, 144, 145, 146, 147, 148, 149, 150, 151, 152, 153, 154, 155, 156, 157, 158, 159, 160, 161, 162, 163, 164, 165, 166, 167, 168, 169, 170, 171, 172, 173, 174, 175, 176, 177, 178, 179, 180, 181, 182, 183, 184, 185, 186, 187, 188, 189, 190, 191, 192, 193, 194, 195, 196, 197, 198, 199, 200, 201, 202, 203, 204, 205, 206, 207, 208, 209, 210, 211, 212, 213, 214, 215, 216, 217, 218, 219, 220, 221, 222, 223, 224, 225, 226, 227, 228, 229, 230, 231, 232, 233, 234, 235, 236, 237, 238, 239, 240, 241, 242, 243, 244, 245, 246, 247, 248, 249, 250, 251, 252, 253, 254, 255, 256, 257, 258, 259, 260, 261, 262, 263, 264, 265, 266, 267, 268, 269, 270, 271, 272, 273, 274, 275, 276, 277, 278, 279, 280, 281, 282, 283, 284, 285, 286, 287, 288, 289, 290, 291, 292, 293, 294, 295, 296, 297, 298, 299, 300, 301, 312, or 313, a variant, derivative, orthologue, paralogue or homologue thereof, in which:

[0546] the amino acid at Mutated site 4 is Ala, and the amino acid at Mutated site 5 is Tyr.

[0547] In another preferred embodiment, the mutated PPO comprises a sequence of SEQ ID NO: 1, 2, 3, 4, 5, 6, 7, 8, 9, 10, 11, 12, 13, 14, 15, 16, 17, 18, 19, 20, 21, 22, 23, 24, 25, 26, 27, 28, 29, 30, 31, 32, 33, 34, 35, 36, 37, 38, 39, 40, 41, 42, 43, 44, 45, 46, 47, 48, 49, 50, 51, 52, 53, 54, 55, 56, 57, 58, 59, 60, 61, 62, 63, 64, 65, 66, 67, 68, 69, 70, 71, 72, 73, 74, 75, 76, 77, 78, 79, 80, 81, 82, 83, 84, 85, 86, 87, 88, 89, 90, 91, 92, 93, 94, 95, 96, 97, 98, 99, 100, 101, 102, 103, 104, 105, 106, 107, 108, 109, 110, 111, 112, 113, 114, 115, 116, 117, 118, 119, 120, 121, 122, 123, 124, 125, 126, 127, 128, 129, 130, 131, 132, 133, 134, 135, 136, 137, 138, 139, 140, 141, 142, 143, 144, 145, 146, 147, 148, 149, 150, 151, 152, 153, 154, 155, 156, 157, 158, 159, 160, 161, 162, 163, 164, 165, 166, 167, 168, 169, 170, 171, 172, 173, 174, 175, 176, 177, 178, 179, 180, 181, 182, 183, 184, 185, 186, 187, 188, 189, 190, 191, 192, 193, 194, 195, 196, 197, 198, 199, 200, 201, 202, 203, 204, 205, 206, 207, 208, 209, 210, 211, 212, 213, 214, 215, 216, 217, 218, 219, 220, 221, 222, 223, 224, 225, 226, 227, 228, 229, 230, 231, 232, 233, 234, 235, 236, 237, 238, 239, 240, 241, 242, 243, 244, 245, 246, 247, 248, 249, 250, 251, 252, 253, 254, 255, 256, 257, 258, 259, 260, 261, 262, 263, 264, 265, 266, 267, 268, 269, 270, 271, 272, 273, 274, 275, 276, 277, 278, 279, 280, 281, 282, 283, 284, 285, 286, 287, 288, 289, 290, 291, 292, 293, 294, 295, 296, 297, 298, 299, 300, 301, 312, or 313, a variant, derivative, orthologue, paralogue or homologue thereof, in which:

[0548] the amino acid at Mutated site 4 is Ala, and the amino acid at Mutated site 5 is Trp.

[0549] In another preferred embodiment, the mutated PPO comprises a sequence of SEQ ID NO: 1, 2, 3, 4, 5, 6, 7, 8, 9, 10, 11, 12, 13, 14, 15, 16, 17, 18, 19, 20, 21, 22, 23, 24, 25, 26, 27, 28, 29, 30, 31, 32, 33, 34, 35, 36, 37, 38, 39, 40, 41, 42, 43, 44, 45, 46, 47, 48, 49, 50, 51, 52, 53, 54, 55, 56, 57, 58, 59, 60, 61, 62, 63, 64, 65, 66, 67, 68, 69, 70, 71, 72, 73, 74, 75, 76, 77, 78, 79, 80, 81, 82, 83, 84, 85, 86, 87, 88, 89, 90, 91, 92, 93, 94, 95, 96, 97, 98, 99, 100, 101, 102, 103, 104, 105, 106, 107, 108, 109, 110, 111, 112, 113, 114, 115, 116, 117, 118, 119, 120, 121, 122, 123, 124, 125, 126, 127, 128, 129, 130, 131, 132, 133, 134, 135, 136, 137, 138, 139, 140, 141, 142, 143, 144, 145, 146, 147, 148, 149, 150, 151, 152, 153, 154, 155, 156, 157, 158, 159, 160, 161, 162, 163, 164, 165, 166, 167, 168, 169, 170, 171, 172, 173, 174, 175, 176, 177, 178, 179, 180, 181, 182, 183, 184, 185, 186, 187, 188, 189, 190, 191, 192, 193, 194, 195, 196, 197, 198, 199, 200, 201, 202, 203, 204, 205, 206, 207, 208, 209, 210, 211, 212, 213, 214, 215, 216, 217, 218, 219, 220, 221, 222, 223, 224, 225, 226, 227, 228, 229, 230, 231, 232, 233, 234, 235, 236, 237, 238, 239, 240, 241, 242, 243, 244, 245, 246, 247, 248, 249, 250, 251, 252, 253, 254, 255, 256, 257, 258, 259, 260, 261, 262, 263, 264, 265, 266, 267, 268, 269, 270, 271, 272, 273, 274, 275, 276, 277, 278, 279, 280, 281, 282, 283, 284, 285, 286, 287, 288, 289, 290, 291, 292, 293, 294, 295, 296, 297, 298, 299, 300, 301, 312, or 313, a variant, derivative, orthologue, paralogue or homologue thereof, in which:

[0550] the amino acid at Mutated site 4 is Arg, and the amino acid at Mutated site 5 is Ala.

[0551] In another preferred embodiment, the mutated PPO comprises a sequence of SEQ ID NO: 1, 2, 3, 4, 5, 6, 7, 8, 9, 10, 11, 12, 13, 14, 15, 16, 17, 18, 19, 20, 21, 22, 23, 24, 25, 26, 27, 28, 29, 30, 31, 32, 33, 34, 35, 36, 37, 38, 39, 40, 41, 42, 43, 44, 45, 46, 47, 48, 49, 50, 51, 52, 53, 54, 55, 56, 57, 58, 59, 60, 61, 62, 63, 64, 65, 66, 67, 68, 69, 70, 71, 72, 73, 74, 75, 76, 77, 78, 79, 80, 81, 82, 83, 84, 85, 86, 87, 88, 89, 90, 91, 92, 93, 94, 95, 96, 97, 98, 99, 100, 101, 102, 103, 104, 105, 106, 107, 108, 109, 110, 111, 112, 113, 114, 115, 116, 117, 118, 119, 120, 121, 122, 123, 124, 125, 126, 127, 128, 129, 130, 131, 132, 133, 134, 135, 136, 137, 138, 139, 140, 141, 142, 143, 144, 145, 146, 147, 148, 149, 150, 151, 152, 153, 154, 155, 156, 157, 158, 159, 160, 161, 162, 163, 164, 165, 166, 167, 168, 169, 170, 171, 172, 173, 174, 175, 176, 177, 178, 179, 180, 181, 182, 183, 184, 185, 186, 187, 188, 189, 190, 191, 192, 193, 194, 195, 196, 197, 198, 199, 200, 201, 202, 203, 204, 205, 206, 207, 208, 209, 210, 211, 212, 213, 214, 215, 216, 217, 218, 219, 220, 221, 222, 223, 224, 225, 226, 227, 228, 229, 230, 231, 232, 233, 234, 235, 236, 237, 238, 239, 240, 241, 242, 243, 244, 245, 246, 247, 248, 249, 250, 251, 252, 253, 254, 255, 256, 257, 258, 259, 260, 261, 262, 263, 264, 265, 266, 267, 268, 269, 270, 271, 272, 273, 274, 275, 276, 277, 278, 279, 280, 281, 282, 283, 284, 285, 286, 287, 288, 289, 290, 291, 292, 293, 294, 295, 296, 297, 298, 299, 300, 301, 312, or 313, a variant, derivative, orthologue, paralogue or homologue thereof, in which:

[0552] the amino acid at Mutated site 4 is Arg, and the amino acid at Mutated site 5 is Leu.

[0553] In another preferred embodiment, the mutated PPO comprises a sequence of SEQ ID NO: 1, 2, 3, 4, 5, 6, 7, 8, 9, 10, 11, 12, 13, 14, 15, 16, 17, 18, 19, 20, 21, 22, 23, 24, 25, 26, 27, 28, 29, 30, 31, 32, 33, 34, 35, 36, 37, 38, 39, 40, 41, 42, 43, 44, 45, 46, 47, 48, 49, 50, 51, 52, 53, 54, 55, 56, 57, 58, 59, 60, 61, 62, 63, 64, 65, 66, 67, 68, 69, 70, 71, 72, 73, 74, 75, 76, 77, 78, 79, 80, 81, 82, 83, 84, 85, 86, 87, 88, 89, 90, 91, 92, 93, 94, 95, 96, 97, 98, 99, 100, 101, 102, 103, 104, 105, 106, 107, 108, 109, 110, 111, 112, 113, 114, 115, 116, 117, 118, 119, 120, 121, 122, 123, 124, 125, 126, 127, 128, 129, 130, 131, 132, 133, 134, 135, 136, 137, 138, 139, 140, 141, 142, 143, 144, 145, 146, 147, 148, 149, 150, 151, 152, 153, 154, 155, 156, 157, 158, 159, 160, 161, 162, 163, 164, 165, 166, 167, 168, 169, 170, 171, 172, 173, 174, 175, 176, 177, 178, 179, 180, 181, 182, 183, 184, 185, 186, 187, 188, 189, 190, 191, 192, 193, 194, 195, 196, 197, 198, 199, 200, 201, 202, 203, 204, 205, 206, 207, 208, 209, 210, 211, 212, 213, 214, 215, 216, 217, 218, 219, 220, 221, 222, 223, 224, 225, 226, 227, 228, 229, 230, 231, 232, 233, 234, 235, 236, 237, 238, 239, 240, 241, 242, 243, 244, 245, 246, 247, 248, 249, 250, 251, 252, 253, 254, 255, 256, 257, 258, 259, 260, 261, 262, 263, 264, 265, 266, 267, 268, 269, 270, 271, 272, 273, 274, 275, 276, 277, 278, 279, 280, 281, 282, 283, 284, 285, 286, 287, 288, 289, 290, 291, 292, 293, 294, 295, 296, 297, 298, 299, 300, 301, 312, or 313, a variant, derivative, orthologue, paralogue or homologue thereof, in which:

[0554] the amino acid at Mutated site 4 is Arg, and the amino acid at Mutated site 5 is Val.

[0555] In another preferred embodiment, the mutated PPO comprises a sequence of SEQ ID NO: 1, 2, 3, 4, 5, 6, 7, 8, 9, 10, 11, 12, 13, 14, 15, 16, 17, 18, 19, 20, 21, 22, 23, 24, 25, 26, 27, 28, 29, 30, 31, 32, 33, 34, 35, 36, 37, 38, 39, 40, 41, 42, 43, 44, 45, 46, 47, 48, 49, 50, 51, 52, 53, 54, 55, 56, 57, 58, 59, 60, 61, 62, 63, 64, 65, 66, 67, 68, 69, 70, 71, 72, 73, 74, 75, 76, 77, 78, 79, 80, 81, 82, 83, 84, 85, 86, 87, 88, 89, 90, 91, 92, 93, 94, 95, 96, 97, 98, 99, 100, 101, 102, 103, 104, 105, 106, 107, 108, 109, 110, 111, 112, 113, 114, 115, 116, 117, 118, 119, 120, 121, 122, 123, 124, 125, 126, 127, 128, 129, 130, 131, 132, 133, 134, 135, 136, 137, 138, 139, 140, 141, 142, 143, 144, 145, 146, 147, 148, 149, 150, 151, 152, 153, 154, 155, 156, 157, 158, 159, 160, 161, 162, 163, 164, 165, 166, 167, 168, 169, 170, 171, 172, 173, 174, 175, 176, 177, 178, 179, 180, 181, 182, 183, 184, 185, 186, 187, 188, 189, 190, 191, 192, 193, 194, 195, 196, 197, 198, 199, 200, 201, 202, 203, 204, 205, 206, 207, 208, 209, 210, 211, 212, 213, 214, 215, 216, 217, 218, 219, 220, 221, 222, 223, 224, 225, 226, 227, 228, 229, 230, 231, 232, 233, 234, 235, 236, 237, 238, 239, 240, 241, 242, 243, 244, 245, 246, 247, 248, 249, 250, 251, 252, 253, 254, 255, 256, 257, 258, 259, 260, 261, 262, 263, 264, 265, 266, 267, 268, 269, 270, 271, 272, 273, 274, 275, 276, 277, 278, 279, 280, 281, 282, 283, 284, 285, 286, 287, 288, 289, 290, 291, 292, 293, 294, 295, 296, 297, 298, 299, 300, 301, 312, or 313, a variant, derivative, orthologue, paralogue or homologue thereof, in which:

[0556] the amino acid at Mutated site 4 is Arg, and the amino acid at Mutated site 5 is Ile.

[0557] In another preferred embodiment, the mutated PPO comprises a sequence of SEQ ID NO: 1, 2, 3, 4, 5, 6, 7, 8, 9, 10, 11, 12, 13, 14, 15, 16, 17, 18, 19, 20, 21, 22, 23, 24, 25, 26, 27, 28, 29, 30, 31, 32, 33, 34, 35, 36, 37, 38, 39, 40, 41, 42, 43, 44, 45, 46, 47, 48, 49, 50, 51, 52, 53, 54, 55, 56, 57, 58, 59, 60, 61, 62, 63, 64, 65, 66, 67, 68, 69, 70, 71, 72, 73, 74, 75, 76, 77, 78, 79, 80, 81, 82, 83, 84, 85, 86, 87, 88, 89, 90, 91, 92, 93, 94, 95, 96, 97, 98, 99, 100, 101, 102, 103, 104, 105, 106, 107, 108, 109, 110, 111, 112, 113, 114, 115, 116, 117, 118, 119, 120, 121, 122, 123, 124, 125, 126, 127, 128, 129, 130, 131, 132, 133, 134, 135, 136, 137, 138, 139, 140, 141, 142, 143, 144, 145, 146, 147, 148, 149, 150, 151, 152, 153, 154, 155, 156, 157, 158, 159, 160, 161, 162, 163, 164, 165, 166, 167, 168, 169, 170, 171, 172, 173, 174, 175, 176, 177, 178, 179, 180, 181, 182, 183, 184, 185, 186, 187, 188, 189, 190, 191, 192, 193, 194, 195, 196, 197, 198, 199, 200, 201, 202, 203, 204, 205, 206, 207, 208, 209, 210, 211, 212, 213, 214, 215, 216, 217, 218, 219, 220, 221, 222, 223, 224, 225, 226, 227, 228, 229, 230, 231, 232, 233, 234, 235, 236, 237, 238, 239, 240, 241, 242, 243, 244, 245, 246, 247, 248, 249, 250, 251, 252, 253, 254, 255, 256, 257, 258, 259, 260, 261, 262, 263, 264, 265, 266, 267, 268, 269, 270, 271, 272, 273, 274, 275, 276, 277, 278, 279, 280, 281, 282, 283, 284, 285, 286, 287, 288, 289, 290, 291, 292, 293, 294, 295, 296, 297, 298, 299, 300, 301, 312, or 313, a variant, derivative, orthologue, paralogue or homologue thereof, in which:

[0558] the amino acid at Mutated site 4 is Arg, and the amino acid at Mutated site 5 is Met.

[0559] In another preferred embodiment, the mutated PPO comprises a sequence of SEQ ID NO: 1, 2, 3, 4, 5, 6, 7, 8, 9, 10, 11, 12, 13, 14, 15, 16, 17, 18, 19, 20, 21, 22, 23, 24, 25, 26, 27, 28, 29, 30, 31, 32, 33, 34, 35, 36, 37, 38, 39, 40, 41, 42, 43, 44, 45, 46, 47, 48, 49, 50, 51, 52, 53, 54, 55, 56, 57, 58, 59, 60, 61, 62, 63, 64, 65, 66, 67, 68, 69, 70, 71, 72, 73, 74, 75, 76, 77, 78, 79, 80, 81, 82, 83, 84, 85, 86, 87, 88, 89, 90, 91, 92, 93, 94, 95, 96, 97, 98, 99, 100, 101, 102, 103, 104, 105, 106, 107, 108, 109, 110, 111, 112, 113, 114, 115, 116, 117, 118, 119, 120, 121, 122, 123, 124, 125, 126, 127, 128, 129, 130, 131, 132, 133, 134, 135, 136, 137, 138, 139, 140, 141, 142, 143, 144, 145, 146, 147, 148, 149, 150, 151, 152, 153, 154, 155, 156, 157, 158, 159, 160, 161, 162, 163, 164, 165, 166, 167, 168, 169, 170, 171, 172, 173, 174, 175, 176, 177, 178, 179, 180, 181, 182, 183, 184, 185, 186, 187, 188, 189, 190, 191, 192, 193, 194, 195, 196, 197, 198, 199, 200, 201, 202, 203, 204, 205, 206, 207, 208, 209, 210, 211, 212, 213, 214, 215, 216, 217, 218, 219, 220, 221, 222, 223, 224, 225, 226, 227, 228, 229, 230, 231, 232, 233, 234, 235, 236, 237, 238, 239, 240, 241, 242, 243, 244, 245, 246, 247, 248, 249, 250, 251, 252, 253, 254, 255, 256, 257, 258, 259, 260, 261, 262, 263, 264, 265, 266, 267, 268, 269, 270, 271, 272, 273, 274, 275, 276, 277, 278, 279, 280, 281, 282, 283, 284, 285, 286, 287, 288, 289, 290, 291, 292, 293, 294, 295, 296, 297, 298, 299, 300, 301, 312, or 313, a variant, derivative, orthologue, paralogue or homologue thereof, in which:

[0560] the amino acid at Mutated site 4 is Arg, and the amino acid at Mutated site 5 is His.

[0561] In another preferred embodiment, the mutated PPO comprises a sequence of SEQ ID NO: 1, 2, 3, 4, 5, 6, 7, 8, 9, 10, 11, 12, 13, 14, 15, 16, 17, 18, 19, 20, 21, 22, 23, 24, 25, 26, 27, 28, 29, 30, 31, 32, 33, 34, 35, 36, 37, 38, 39, 40, 41, 42, 43, 44, 45, 46, 47, 48, 49, 50, 51, 52, 53, 54, 55, 56, 57, 58, 59, 60, 61, 62, 63, 64, 65, 66, 67, 68, 69, 70, 71, 72, 73, 74, 75, 76, 77, 78, 79, 80, 81, 82, 83, 84, 85, 86, 87, 88, 89, 90, 91, 92, 93, 94, 95, 96, 97, 98, 99, 100, 101, 102, 103, 104, 105, 106, 107, 108, 109, 110, 111, 112, 113, 114, 115, 116, 117, 118, 119, 120, 121, 122, 123, 124, 125, 126, 127, 128, 129, 130, 131, 132, 133, 134, 135, 136, 137, 138, 139, 140, 141, 142, 143, 144, 145, 146, 147, 148, 149, 150, 151, 152, 153, 154, 155, 156, 157, 158, 159, 160, 161, 162, 163, 164, 165, 166, 167, 168, 169, 170, 171, 172, 173, 174, 175, 176, 177, 178, 179, 180, 181, 182, 183, 184, 185, 186, 187, 188, 189, 190, 191, 192, 193, 194, 195, 196, 197, 198, 199, 200, 201, 202, 203, 204, 205, 206, 207, 208, 209, 210, 211, 212, 213, 214, 215, 216, 217, 218, 219, 220, 221, 222, 223, 224, 225, 226, 227, 228, 229, 230, 231, 232, 233, 234, 235, 236, 237, 238, 239, 240, 241, 242, 243, 244, 245, 246, 247, 248, 249, 250, 251, 252, 253, 254, 255, 256, 257, 258, 259, 260, 261, 262, 263, 264, 265, 266, 267, 268, 269, 270, 271, 272, 273, 274, 275, 276, 277, 278, 279, 280, 281, 282, 283, 284, 285, 286, 287, 288, 289, 290, 291, 292, 293, 294, 295, 296, 297, 298, 299, 300, 301, 312, or 313, a variant, derivative, orthologue, paralogue or homologue thereof, in which:

[0562] the amino acid at Mutated site 4 is Arg, and the amino acid at Mutated site 5 is Lys.

[0563] In another preferred embodiment, the mutated PPO comprises a sequence of SEQ ID NO: 1, 2, 3, 4, 5, 6, 7, 8, 9, 10, 11, 12, 13, 14, 15, 16, 17, 18, 19, 20, 21, 22, 23, 24, 25, 26, 27, 28, 29, 30, 31, 32, 33, 34, 35, 36, 37, 38, 39, 40, 41, 42, 43, 44, 45, 46, 47, 48, 49, 50, 51, 52, 53, 54, 55, 56, 57, 58, 59, 60, 61, 62, 63, 64, 65, 66, 67, 68, 69, 70, 71, 72, 73, 74, 75, 76, 77, 78, 79, 80, 81, 82, 83, 84, 85, 86, 87, 88, 89, 90, 91, 92, 93, 94, 95, 96, 97, 98, 99, 100, 101, 102, 103, 104, 105, 106, 107, 108, 109, 110, 111, 112, 113, 114, 115, 116, 117, 118, 119, 120, 121, 122, 123, 124, 125, 126, 127, 128, 129, 130, 131, 132, 133, 134, 135, 136, 137, 138, 139, 140, 141, 142, 143, 144, 145, 146, 147, 148, 149, 150, 151, 152, 153, 154, 155, 156, 157, 158, 159, 160, 161, 162, 163, 164, 165, 166, 167, 168, 169, 170, 171, 172, 173, 174, 175, 176, 177, 178, 179, 180, 181, 182, 183, 184, 185, 186, 187, 188, 189, 190, 191, 192, 193, 194, 195, 196, 197, 198, 199, 200, 201, 202, 203, 204, 205, 206, 207, 208, 209, 210, 211, 212, 213, 214, 215, 216, 217, 218, 219, 220, 221, 222, 223, 224, 225, 226, 227, 228, 229, 230, 231, 232, 233, 234, 235, 236, 237, 238, 239, 240, 241, 242, 243, 244, 245, 246, 247, 248, 249, 250, 251, 252, 253, 254, 255, 256, 257, 258, 259, 260, 261, 262, 263, 264, 265, 266, 267, 268, 269, 270, 271, 272, 273, 274, 275, 276, 277, 278, 279, 280, 281, 282, 283, 284, 285, 286, 287, 288, 289, 290, 291, 292, 293, 294, 295, 296, 297, 298, 299, 300, 301, 312, or 313, a variant, derivative, orthologue, paralogue or homologue thereof, in which:

[0564] the amino acid at Mutated site 4 is Arg, and the amino acid at Mutated site 5 is Asp.

[0565] In another preferred embodiment, the mutated PPO comprises a sequence of SEQ ID NO: 1, 2, 3, 4, 5, 6, 7, 8, 9, 10, 11, 12, 13, 14, 15, 16, 17, 18, 19, 20, 21, 22, 23, 24, 25, 26, 27, 28, 29, 30, 31, 32, 33, 34, 35, 36, 37, 38, 39, 40, 41, 42, 43, 44, 45, 46, 47, 48, 49, 50, 51, 52, 53, 54, 55, 56, 57, 58, 59, 60, 61, 62, 63, 64, 65, 66, 67, 68, 69, 70, 71, 72, 73, 74, 75, 76, 77, 78, 79, 80, 81, 82, 83, 84, 85, 86, 87, 88, 89, 90, 91, 92, 93, 94, 95, 96, 97, 98, 99, 100, 101, 102, 103, 104, 105, 106, 107, 108, 109, 110, 111, 112, 113, 114, 115, 116, 117, 118, 119, 120, 121, 122, 123, 124, 125, 126, 127, 128, 129, 130, 131, 132, 133, 134, 135, 136, 137, 138, 139, 140, 141, 142, 143, 144, 145, 146, 147, 148, 149, 150, 151, 152, 153, 154, 155, 156, 157, 158, 159, 160, 161, 162, 163, 164, 165, 166, 167, 168, 169, 170, 171, 172, 173, 174, 175, 176, 177, 178, 179, 180, 181, 182, 183, 184, 185, 186, 187, 188, 189, 190, 191, 192, 193, 194, 195, 196, 197, 198, 199, 200, 201, 202, 203, 204, 205, 206, 207, 208, 209, 210, 211, 212, 213, 214, 215, 216, 217, 218, 219, 220, 221, 222, 223, 224, 225, 226, 227, 228, 229, 230, 231, 232, 233, 234, 235, 236, 237, 238, 239, 240, 241, 242, 243, 244, 245, 246, 247, 248, 249, 250, 251, 252, 253, 254, 255, 256, 257, 258, 259, 260, 261, 262, 263, 264, 265, 266, 267, 268, 269, 270, 271, 272, 273, 274, 275, 276, 277, 278, 279, 280, 281, 282, 283, 284, 285, 286, 287, 288, 289, 290, 291, 292, 293, 294, 295, 296, 297, 298, 299, 300, 301, 312, or 313, a variant, derivative, orthologue, paralogue or homologue thereof, in which:

[0566] the amino acid at Mutated site 4 is Arg, and the amino acid at Mutated site 5 is Glu.

[0567] In another preferred embodiment, the mutated PPO comprises a sequence of SEQ ID NO: 1, 2, 3, 4, 5, 6, 7, 8, 9, 10, 11, 12, 13, 14, 15, 16, 17, 18, 19, 20, 21, 22, 23, 24, 25, 26, 27, 28, 29, 30, 31, 32, 33, 34, 35, 36, 37, 38, 39, 40, 41, 42, 43, 44, 45, 46, 47, 48, 49, 50, 51, 52, 53, 54, 55, 56, 57, 58, 59, 60, 61, 62, 63, 64, 65, 66, 67, 68, 69, 70, 71, 72, 73, 74, 75, 76, 77, 78, 79, 80, 81, 82, 83, 84, 85, 86, 87, 88, 89, 90, 91, 92, 93, 94, 95, 96, 97, 98, 99, 100, 101, 102, 103, 104, 105, 106, 107, 108, 109, 110, 111, 112, 113, 114, 115, 116, 117, 118, 119, 120, 121, 122, 123, 124, 125, 126, 127, 128, 129, 130, 131, 132, 133, 134, 135, 136, 137, 138, 139, 140, 141, 142, 143, 144, 145, 146, 147, 148, 149, 150, 151, 152, 153, 154, 155, 156, 157, 158, 159, 160, 161, 162, 163, 164, 165, 166, 167, 168, 169, 170, 171, 172, 173, 174, 175, 176, 177, 178, 179, 180, 181, 182, 183, 184, 185, 186, 187, 188, 189, 190, 191, 192, 193, 194, 195, 196, 197, 198, 199, 200, 201, 202, 203, 204, 205, 206, 207, 208, 209, 210, 211, 212, 213, 214, 215, 216, 217, 218, 219, 220, 221, 222, 223, 224, 225, 226, 227, 228, 229, 230, 231, 232, 233, 234, 235, 236, 237, 238, 239, 240, 241, 242, 243, 244, 245, 246, 247, 248, 249, 250, 251, 252, 253, 254, 255, 256, 257, 258, 259, 260, 261, 262, 263, 264, 265, 266, 267, 268, 269, 270, 271, 272, 273, 274, 275, 276, 277, 278, 279, 280, 281, 282, 283, 284, 285, 286, 287, 288, 289, 290, 291, 292, 293, 294, 295, 296, 297, 298, 299, 300, 301, 312, or 313, a variant, derivative, orthologue, paralogue or homologue thereof, in which:

[0568] the amino acid at Mutated site 4 is Arg, and the amino acid at Mutated site 5 is Ser.

[0569] In another preferred embodiment, the mutated PPO comprises a sequence of SEQ ID NO: 1, 2, 3, 4, 5, 6, 7, 8, 9, 10, 11, 12, 13, 14, 15, 16, 17, 18, 19, 20, 21, 22, 23, 24, 25, 26, 27, 28, 29, 30, 31, 32, 33, 34, 35, 36, 37, 38, 39, 40, 41, 42, 43, 44, 45, 46, 47, 48, 49, 50, 51, 52, 53, 54, 55, 56, 57, 58, 59, 60, 61, 62, 63, 64, 65, 66, 67, 68, 69, 70, 71, 72, 73, 74, 75, 76, 77, 78, 79, 80, 81, 82, 83, 84, 85, 86, 87, 88, 89, 90, 91, 92, 93, 94, 95, 96, 97, 98, 99, 100, 101, 102, 103, 104, 105, 106, 107, 108, 109, 110, 111, 112, 113, 114, 115, 116, 117, 118, 119, 120, 121, 122, 123, 124, 125, 126, 127, 128, 129, 130, 131, 132, 133, 134, 135, 136, 137, 138, 139, 140, 141, 142, 143, 144, 145, 146, 147, 148, 149, 150, 151, 152, 153, 154, 155, 156, 157, 158, 159, 160, 161, 162, 163, 164, 165, 166, 167, 168, 169, 170, 171, 172, 173, 174, 175, 176, 177, 178, 179, 180, 181, 182, 183, 184, 185, 186, 187, 188, 189, 190, 191, 192, 193, 194, 195, 196, 197, 198, 199, 200, 201, 202, 203, 204, 205, 206, 207, 208, 209, 210, 211, 212, 213, 214, 215, 216, 217, 218, 219, 220, 221, 222, 223, 224, 225, 226, 227, 228, 229, 230, 231, 232, 233, 234, 235, 236, 237, 238, 239, 240, 241, 242, 243, 244, 245, 246, 247, 248, 249, 250, 251, 252, 253, 254, 255, 256, 257, 258, 259, 260, 261, 262, 263, 264, 265, 266, 267, 268, 269, 270, 271, 272, 273, 274, 275, 276, 277, 278, 279, 280, 281, 282, 283, 284, 285, 286, 287, 288, 289, 290, 291, 292, 293, 294, 295, 296, 297, 298, 299, 300, 301, 312, or 313, a variant, derivative, orthologue, paralogue or homologue thereof, in which:

[0570] the amino acid at Mutated site 4 is Arg, and the amino acid at Mutated site 5 is Thr.

[0571] In another preferred embodiment, the mutated PPO comprises a sequence of SEQ ID NO: 1, 2, 3, 4, 5, 6, 7, 8, 9, 10, 11, 12, 13, 14, 15, 16, 17, 18, 19, 20, 21, 22, 23, 24, 25, 26, 27, 28, 29, 30, 31, 32, 33, 34, 35, 36, 37, 38, 39, 40, 41, 42, 43, 44, 45, 46, 47, 48, 49, 50, 51, 52, 53, 54, 55, 56, 57, 58, 59, 60, 61, 62, 63, 64, 65, 66, 67, 68, 69, 70, 71, 72, 73, 74, 75, 76, 77, 78, 79, 80, 81, 82, 83, 84, 85, 86, 87, 88, 89, 90, 91, 92, 93, 94, 95, 96, 97, 98, 99, 100, 101, 102, 103, 104, 105, 106, 107, 108, 109, 110, 111, 112, 113, 114, 115, 116, 117, 118, 119, 120, 121, 122, 123, 124, 125, 126, 127, 128, 129, 130, 131, 132, 133, 134, 135, 136, 137, 138, 139, 140, 141, 142, 143, 144, 145, 146, 147, 148, 149, 150, 151, 152, 153, 154, 155, 156, 157, 158, 159, 160, 161, 162, 163, 164, 165, 166, 167, 168, 169, 170, 171, 172, 173, 174, 175, 176, 177, 178, 179, 180, 181, 182, 183, 184, 185, 186, 187, 188, 189, 190, 191, 192, 193, 194, 195, 196, 197, 198, 199, 200, 201, 202, 203, 204, 205, 206, 207, 208, 209, 210, 211, 212, 213, 214, 215, 216, 217, 218, 219, 220, 221, 222, 223, 224, 225, 226, 227, 228, 229, 230, 231, 232, 233, 234, 235, 236, 237, 238, 239, 240, 241, 242, 243, 244, 245, 246, 247, 248, 249, 250, 251, 252, 253, 254, 255, 256, 257, 258, 259, 260, 261, 262, 263, 264, 265, 266, 267, 268, 269, 270, 271, 272, 273, 274, 275, 276, 277, 278, 279, 280, 281, 282, 283, 284, 285, 286, 287, 288, 289, 290, 291, 292, 293, 294, 295, 296, 297, 298, 299, 300, 301, 312, or 313, a variant, derivative, orthologue, paralogue or homologue thereof, in which:

[0572] the amino acid at Mutated site 4 is Arg, and the amino acid at Mutated site 5 is Asn.

[0573] In another preferred embodiment, the mutated PPO comprises a sequence of SEQ ID NO: 1, 2, 3, 4, 5, 6, 7, 8, 9, 10, 11, 12, 13, 14, 15, 16, 17, 18, 19, 20, 21, 22, 23, 24, 25, 26, 27, 28, 29, 30, 31, 32, 33, 34, 35, 36, 37, 38, 39, 40, 41, 42, 43, 44, 45, 46, 47, 48, 49, 50, 51, 52, 53, 54, 55, 56, 57, 58, 59, 60, 61, 62, 63, 64, 65, 66, 67, 68, 69, 70, 71, 72, 73, 74, 75, 76, 77, 78, 79, 80, 81, 82, 83, 84, 85, 86, 87, 88, 89, 90, 91, 92, 93, 94, 95, 96, 97, 98, 99, 100, 101, 102, 103, 104, 105, 106, 107, 108, 109, 110, 111, 112, 113, 114, 115, 116, 117, 118, 119, 120, 121, 122, 123, 124, 125, 126, 127, 128, 129, 130, 131, 132, 133, 134, 135, 136, 137, 138, 139, 140, 141, 142, 143, 144, 145, 146, 147, 148, 149, 150, 151, 152, 153, 154, 155, 156, 157, 158, 159, 160, 161, 162, 163, 164, 165, 166, 167, 168, 169, 170, 171, 172, 173, 174, 175, 176, 177, 178, 179, 180, 181, 182, 183, 184, 185, 186, 187, 188, 189, 190, 191, 192, 193, 194, 195, 196, 197, 198, 199, 200, 201, 202, 203, 204, 205, 206, 207, 208, 209, 210, 211, 212, 213, 214, 215, 216, 217, 218, 219, 220, 221, 222, 223, 224, 225, 226, 227, 228, 229, 230, 231, 232, 233, 234, 235, 236, 237, 238, 239, 240, 241, 242, 243, 244, 245, 246, 247, 248, 249, 250, 251, 252, 253, 254, 255, 256, 257, 258, 259, 260, 261, 262, 263, 264, 265, 266, 267, 268, 269, 270, 271, 272, 273, 274, 275, 276, 277, 278, 279, 280, 281, 282, 283, 284, 285, 286, 287, 288, 289, 290, 291, 292, 293, 294, 295, 296, 297, 298, 299, 300, 301, 312, or 313, a variant, derivative, orthologue, paralogue or homologue thereof, in which:

[0574] the amino acid at Mutated site 4 is Arg, and the amino acid at Mutated site 5 is Gln.

[0575] In another preferred embodiment, the mutated PPO comprises a sequence of SEQ ID NO: 1, 2, 3, 4, 5, 6, 7, 8, 9, 10, 11, 12, 13, 14, 15, 16, 17, 18, 19, 20, 21, 22, 23, 24, 25, 26, 27, 28, 29, 30, 31, 32, 33, 34, 35, 36, 37, 38, 39, 40, 41, 42, 43, 44, 45, 46, 47, 48, 49, 50, 51, 52, 53, 54, 55, 56, 57, 58, 59, 60, 61, 62, 63, 64, 65, 66, 67, 68, 69, 70, 71, 72, 73, 74, 75, 76, 77, 78, 79, 80, 81, 82, 83, 84, 85, 86, 87, 88, 89, 90, 91, 92, 93, 94, 95, 96, 97, 98, 99, 100, 101, 102, 103, 104, 105, 106, 107, 108, 109, 110, 111, 112, 113, 114, 115, 116, 117, 118, 119, 120, 121, 122, 123, 124, 125, 126, 127, 128, 129, 130, 131, 132, 133, 134, 135, 136, 137, 138, 139, 140, 141, 142, 143, 144, 145, 146, 147, 148, 149, 150, 151, 152, 153, 154, 155, 156, 157, 158, 159, 160, 161, 162, 163, 164, 165, 166, 167, 168, 169, 170, 171, 172, 173, 174, 175, 176, 177, 178, 179, 180, 181, 182, 183, 184, 185, 186, 187, 188, 189, 190, 191, 192, 193, 194, 195, 196, 197, 198, 199, 200, 201, 202, 203, 204, 205, 206, 207, 208, 209, 210, 211, 212, 213, 214, 215, 216, 217, 218, 219, 220, 221, 222, 223, 224, 225, 226, 227, 228, 229, 230, 231, 232, 233, 234, 235, 236, 237, 238, 239, 240, 241, 242, 243, 244, 245, 246, 247, 248, 249, 250, 251, 252, 253, 254, 255, 256, 257, 258, 259, 260, 261, 262, 263, 264, 265, 266, 267, 268, 269, 270, 271, 272, 273, 274, 275, 276, 277, 278, 279, 280, 281, 282, 283, 284, 285, 286, 287, 288, 289, 290, 291, 292, 293, 294, 295, 296, 297, 298, 299, 300, 301, 312, or 313, a variant, derivative, orthologue, paralogue or homologue thereof, in which:

[0576] the amino acid at Mutated site 4 is Arg, and the amino acid at Mutated site 5 is Cys.

[0577] In another preferred embodiment, the mutated PPO comprises a sequence of SEQ ID NO: 1, 2, 3, 4, 5, 6, 7, 8, 9, 10, 11, 12, 13, 14, 15, 16, 17, 18, 19, 20, 21, 22, 23, 24, 25, 26, 27, 28, 29, 30, 31, 32, 33, 34, 35, 36, 37, 38, 39, 40, 41, 42, 43, 44, 45, 46, 47, 48, 49, 50, 51, 52, 53, 54, 55, 56, 57, 58, 59, 60, 61, 62, 63, 64, 65, 66, 67, 68, 69, 70, 71, 72, 73, 74, 75, 76, 77, 78, 79, 80, 81, 82, 83, 84, 85, 86, 87, 88, 89, 90, 91, 92, 93, 94, 95, 96, 97, 98, 99, 100, 101, 102, 103, 104, 105, 106, 107, 108, 109, 110, 111, 112, 113, 114, 115, 116, 117, 118, 119, 120, 121, 122, 123, 124, 125, 126, 127, 128, 129, 130, 131, 132, 133, 134, 135, 136, 137, 138, 139, 140, 141, 142, 143, 144, 145, 146, 147, 148, 149, 150, 151, 152, 153, 154, 155, 156, 157, 158, 159, 160, 161, 162, 163, 164, 165, 166, 167, 168, 169, 170, 171, 172, 173, 174, 175, 176, 177, 178, 179, 180, 181, 182, 183, 184, 185, 186, 187, 188, 189, 190, 191, 192, 193, 194, 195, 196, 197, 198, 199, 200, 201, 202, 203, 204, 205, 206, 207, 208, 209, 210, 211, 212, 213, 214, 215, 216, 217, 218, 219, 220, 221, 222, 223, 224, 225, 226, 227, 228, 229, 230, 231, 232, 233, 234, 235, 236, 237, 238, 239, 240, 241, 242, 243, 244, 245, 246, 247, 248, 249, 250, 251, 252, 253, 254, 255, 256, 257, 258, 259, 260, 261, 262, 263, 264, 265, 266, 267, 268, 269, 270, 271, 272, 273, 274, 275, 276, 277, 278, 279, 280, 281, 282, 283, 284, 285, 286, 287, 288, 289, 290, 291, 292, 293, 294, 295, 296, 297, 298, 299, 300, 301, 312, or 313, a variant, derivative, orthologue, paralogue or homologue thereof, in which:

[0578] the amino acid at Mutated site 4 is Arg, and the amino acid at Mutated site 5 is Gly.

[0579] In another preferred embodiment, the mutated PPO comprises a sequence of SEQ ID NO: 1, 2, 3, 4, 5, 6, 7, 8, 9, 10, 11, 12, 13, 14, 15, 16, 17, 18, 19, 20, 21, 22, 23, 24, 25, 26, 27, 28, 29, 30, 31, 32, 33, 34, 35, 36, 37, 38, 39, 40, 41, 42, 43, 44, 45, 46, 47, 48, 49, 50, 51, 52, 53, 54, 55, 56, 57, 58, 59, 60, 61, 62, 63, 64, 65, 66, 67, 68, 69, 70, 71, 72, 73, 74, 75, 76, 77, 78, 79, 80, 81, 82, 83, 84, 85, 86, 87, 88, 89, 90, 91, 92, 93, 94, 95, 96, 97, 98, 99, 100, 101, 102, 103, 104, 105, 106, 107, 108, 109, 110, 111, 112, 113, 114, 115, 116, 117, 118, 119, 120, 121, 122, 123, 124, 125, 126, 127, 128, 129, 130, 131, 132, 133, 134, 135, 136, 137, 138, 139, 140, 141, 142, 143, 144, 145, 146, 147, 148, 149, 150, 151, 152, 153, 154, 155, 156, 157, 158, 159, 160, 161, 162, 163, 164, 165, 166, 167, 168, 169, 170, 171, 172, 173, 174, 175, 176, 177, 178, 179, 180, 181, 182, 183, 184, 185, 186, 187, 188, 189, 190, 191, 192, 193, 194, 195, 196, 197, 198, 199, 200, 201, 202, 203, 204, 205, 206, 207, 208, 209, 210, 211, 212, 213, 214, 215, 216, 217, 218, 219, 220, 221, 222, 223, 224, 225, 226, 227, 228, 229, 230, 231, 232, 233, 234, 235, 236, 237, 238, 239, 240, 241, 242, 243, 244, 245, 246, 247, 248, 249, 250, 251, 252, 253, 254, 255, 256, 257, 258, 259, 260, 261, 262, 263, 264, 265, 266, 267, 268, 269, 270, 271, 272, 273, 274, 275, 276, 277, 278, 279, 280, 281, 282, 283, 284, 285, 286, 287, 288, 289, 290, 291, 292, 293, 294, 295, 296, 297, 298, 299, 300, 301, 312, or 313, a variant, derivative, orthologue, paralogue or homologue thereof, in which:

[0580] the amino acid at Mutated site 4 is Arg, and the amino acid at Mutated site 5 is Pro.

[0581] In another preferred embodiment, the mutated PPO comprises a sequence of SEQ ID NO: 1, 2, 3, 4, 5, 6, 7, 8, 9, 10, 11, 12, 13, 14, 15, 16, 17, 18, 19, 20, 21, 22, 23, 24, 25, 26, 27, 28, 29, 30, 31, 32, 33, 34, 35, 36, 37, 38, 39, 40, 41, 42, 43, 44, 45, 46, 47, 48, 49, 50, 51, 52, 53, 54, 55, 56, 57, 58, 59, 60, 61, 62, 63, 64, 65, 66, 67, 68, 69, 70, 71, 72, 73, 74, 75, 76, 77, 78, 79, 80, 81, 82, 83, 84, 85, 86, 87, 88, 89, 90, 91, 92, 93, 94, 95, 96, 97, 98, 99, 100, 101, 102, 103, 104, 105, 106, 107, 108, 109, 110, 111, 112, 113, 114, 115, 116, 117, 118, 119, 120, 121, 122, 123, 124, 125, 126, 127, 128, 129, 130, 131, 132, 133, 134, 135, 136, 137, 138, 139, 140, 141, 142, 143, 144, 145, 146, 147, 148, 149, 150, 151, 152, 153, 154, 155, 156, 157, 158, 159, 160, 161, 162, 163, 164, 165, 166, 167, 168, 169, 170, 171, 172, 173, 174, 175, 176, 177, 178, 179, 180, 181, 182, 183, 184, 185, 186, 187, 188, 189, 190, 191, 192, 193, 194, 195, 196, 197, 198, 199, 200, 201, 202, 203, 204, 205, 206, 207, 208, 209, 210, 211, 212, 213, 214, 215, 216, 217, 218, 219, 220, 221, 222, 223, 224, 225, 226, 227, 228, 229, 230, 231, 232, 233, 234, 235, 236, 237, 238, 239, 240, 241, 242, 243, 244, 245, 246, 247, 248, 249, 250, 251, 252, 253, 254, 255, 256, 257, 258, 259, 260, 261, 262, 263, 264, 265, 266, 267, 268, 269, 270, 271, 272, 273, 274, 275, 276, 277, 278, 279, 280, 281, 282, 283, 284, 285, 286, 287, 288, 289, 290, 291, 292, 293, 294, 295, 296, 297, 298, 299, 300, 301, 312, or 313, a variant, derivative, orthologue, paralogue or homologue thereof, in which:

[0582] the amino acid at Mutated site 4 is Arg, and the amino acid at Mutated site 5 is Arg.

[0583] In another preferred embodiment, the mutated PPO comprises a sequence of SEQ ID NO: 1, 2, 3, 4, 5, 6, 7, 8, 9, 10, 11, 12, 13, 14, 15, 16, 17, 18, 19, 20, 21, 22, 23, 24, 25, 26, 27, 28, 29, 30, 31, 32, 33, 34, 35, 36, 37, 38, 39, 40, 41, 42, 43, 44, 45, 46, 47, 48, 49, 50, 51, 52, 53, 54, 55, 56, 57, 58, 59, 60, 61, 62, 63, 64, 65, 66, 67, 68, 69, 70, 71, 72, 73, 74, 75, 76, 77, 78, 79, 80, 81, 82, 83, 84, 85, 86, 87, 88, 89, 90, 91, 92, 93, 94, 95, 96, 97, 98, 99, 100, 101, 102, 103, 104, 105, 106, 107, 108, 109, 110, 111, 112, 113, 114, 115, 116, 117, 118, 119, 120, 121, 122, 123, 124, 125, 126, 127, 128, 129, 130, 131, 132, 133, 134, 135, 136, 137, 138, 139, 140, 141, 142, 143, 144, 145, 146, 147, 148, 149, 150, 151, 152, 153, 154, 155, 156, 157, 158, 159, 160, 161, 162, 163, 164, 165, 166, 167, 168, 169, 170, 171, 172, 173, 174, 175, 176, 177, 178, 179, 180, 181, 182, 183, 184, 185, 186, 187, 188, 189, 190, 191, 192, 193, 194, 195, 196, 197, 198, 199, 200, 201, 202, 203, 204, 205, 206, 207, 208, 209, 210, 211, 212, 213, 214, 215, 216, 217, 218, 219, 220, 221, 222, 223, 224, 225, 226, 227, 228, 229, 230, 231, 232, 233, 234, 235, 236, 237, 238, 239, 240, 241, 242, 243, 244, 245, 246, 247, 248, 249, 250, 251, 252, 253, 254, 255, 256, 257, 258, 259, 260, 261, 262, 263, 264, 265, 266, 267, 268, 269, 270, 271, 272, 273, 274, 275, 276, 277, 278, 279, 280, 281, 282, 283, 284, 285, 286, 287, 288, 289, 290, 291, 292, 293, 294, 295, 296, 297, 298, 299, 300, 301, 312, or 313, a variant, derivative, orthologue, paralogue or homologue thereof, in which:

[0584] the amino acid at Mutated site 4 is Arg, and the amino acid at Mutated site 5 is Tyr.

[0585] In another preferred embodiment, the mutated PPO comprises a sequence of SEQ ID NO: 1, 2, 3, 4, 5, 6, 7, 8, 9, 10, 11, 12, 13, 14, 15, 16, 17, 18, 19, 20, 21, 22, 23, 24, 25, 26, 27, 28, 29, 30, 31, 32, 33, 34, 35, 36, 37, 38, 39, 40, 41, 42, 43, 44, 45, 46, 47, 48, 49, 50, 51, 52, 53, 54, 55, 56, 57, 58, 59, 60, 61, 62, 63, 64, 65, 66, 67, 68, 69, 70, 71, 72, 73, 74, 75, 76, 77, 78, 79, 80, 81, 82, 83, 84, 85, 86, 87, 88, 89, 90, 91, 92, 93, 94, 95, 96, 97, 98, 99, 100, 101, 102, 103, 104, 105, 106, 107, 108, 109, 110, 111, 112, 113, 114, 115, 116, 117, 118, 119, 120, 121, 122, 123, 124, 125, 126, 127, 128, 129, 130, 131, 132, 133, 134, 135, 136, 137, 138, 139, 140, 141, 142, 143, 144, 145, 146, 147, 148, 149, 150, 151, 152, 153, 154, 155, 156, 157, 158, 159, 160, 161, 162, 163, 164, 165, 166, 167, 168, 169, 170, 171, 172, 173, 174, 175, 176, 177, 178, 179, 180, 181, 182, 183, 184, 185, 186, 187, 188, 189, 190, 191, 192, 193, 194, 195, 196, 197, 198, 199, 200, 201, 202, 203, 204, 205, 206, 207, 208, 209, 210, 211, 212, 213, 214, 215, 216, 217, 218, 219, 220, 221, 222, 223, 224, 225, 226, 227, 228, 229, 230, 231, 232, 233, 234, 235, 236, 237, 238, 239, 240, 241, 242, 243, 244, 245, 246, 247, 248, 249, 250, 251, 252, 253, 254, 255, 256, 257, 258, 259, 260, 261, 262, 263, 264, 265, 266, 267, 268, 269, 270, 271, 272, 273, 274, 275, 276, 277, 278, 279, 280, 281, 282, 283, 284, 285, 286, 287, 288, 289, 290, 291, 292, 293, 294, 295, 296, 297, 298, 299, 300, 301, 312, or 313, a variant, derivative, orthologue, paralogue or homologue thereof, in which:

[0586] the amino acid at Mutated site 4 is Arg, and the amino acid at Mutated site 5 is Trp.

[0587] In another preferred embodiment, the mutated PPO comprises a sequence of SEQ ID NO: 1, 2, 3, 4, 5, 6, 7, 8, 9, 10, 11, 12, 13, 14, 15, 16, 17, 18, 19, 20, 21, 22, 23, 24, 25, 26, 27, 28, 29, 30, 31, 32, 33, 34, 35, 36, 37, 38, 39, 40, 41, 42, 43, 44, 45, 46, 47, 48, 49, 50, 51, 52, 53, 54, 55, 56, 57, 58, 59, 60, 61, 62, 63, 64, 65, 66, 67, 68, 69, 70, 71, 72, 73, 74, 75, 76, 77, 78, 79, 80, 81, 82, 83, 84, 85, 86, 87, 88, 89, 90, 91, 92, 93, 94, 95, 96, 97, 98, 99, 100, 101, 102, 103, 104, 105, 106, 107, 108, 109, 110, 111, 112, 113, 114, 115, 116, 117, 118, 119, 120, 121, 122, 123, 124, 125, 126, 127, 128, 129, 130, 131, 132, 133, 134, 135, 136, 137, 138, 139, 140, 141, 142, 143, 144, 145, 146, 147, 148, 149, 150, 151, 152, 153, 154, 155, 156, 157, 158, 159, 160, 161, 162, 163, 164, 165, 166, 167, 168, 169, 170, 171, 172, 173, 174, 175, 176, 177, 178, 179, 180, 181, 182, 183, 184, 185, 186, 187, 188, 189, 190, 191, 192, 193, 194, 195, 196, 197, 198, 199, 200, 201, 202, 203, 204, 205, 206, 207, 208, 209, 210, 211, 212, 213, 214, 215, 216, 217, 218, 219, 220, 221, 222, 223, 224, 225, 226, 227, 228, 229, 230, 231, 232, 233, 234, 235, 236, 237, 238, 239, 240, 241, 242, 243, 244, 245, 246, 247, 248, 249, 250, 251, 252, 253, 254, 255, 256, 257, 258, 259, 260, 261, 262, 263, 264, 265, 266, 267, 268, 269, 270, 271, 272, 273, 274, 275, 276, 277, 278, 279, 280, 281, 282, 283, 284, 285, 286, 287, 288, 289, 290, 291, 292, 293, 294, 295, 296, 297, 298, 299, 300, 301, 312, or 313, a variant, derivative, orthologue, paralogue or homologue thereof, in which:

[0588] the amino acid at Mutated site 4 is Val, and the amino acid at Mutated site 5 is Ala.

[0589] In another preferred embodiment, the mutated PPO comprises a sequence of SEQ ID NO: 1, 2, 3, 4, 5, 6, 7, 8, 9, 10, 11, 12, 13, 14, 15, 16, 17, 18, 19, 20, 21, 22, 23, 24, 25, 26, 27, 28, 29, 30, 31, 32, 33, 34, 35, 36, 37, 38, 39, 40, 41, 42, 43, 44, 45, 46, 47, 48, 49, 50, 51, 52, 53, 54, 55, 56, 57, 58, 59, 60, 61, 62, 63, 64, 65, 66, 67, 68, 69, 70, 71, 72, 73, 74, 75, 76, 77, 78, 79, 80, 81, 82, 83, 84, 85, 86, 87, 88, 89, 90, 91, 92, 93, 94, 95, 96, 97, 98, 99, 100, 101, 102, 103, 104, 105, 106, 107, 108, 109, 110, 111, 112, 113, 114, 115, 116, 117, 118, 119, 120, 121, 122, 123, 124, 125, 126, 127, 128, 129, 130, 131, 132, 133, 134, 135, 136, 137, 138, 139, 140, 141, 142, 143, 144, 145, 146, 147, 148, 149, 150, 151, 152, 153, 154, 155, 156, 157, 158, 159, 160, 161, 162, 163, 164, 165, 166, 167, 168, 169, 170, 171, 172, 173, 174, 175, 176, 177, 178, 179, 180, 181, 182, 183, 184, 185, 186, 187, 188, 189, 190, 191, 192, 193, 194, 195, 196, 197, 198, 199, 200, 201, 202, 203, 204, 205, 206, 207, 208, 209, 210, 211, 212, 213, 214, 215, 216, 217, 218, 219, 220, 221, 222, 223, 224, 225, 226, 227, 228, 229, 230, 231, 232, 233, 234, 235, 236, 237, 238, 239, 240, 241, 242, 243, 244, 245, 246, 247, 248, 249, 250, 251, 252, 253, 254, 255, 256, 257, 258, 259, 260, 261, 262, 263, 264, 265, 266, 267, 268, 269, 270, 271, 272, 273, 274, 275, 276, 277, 278, 279, 280, 281, 282, 283, 284, 285, 286, 287, 288, 289, 290, 291, 292, 293, 294, 295, 296, 297, 298, 299, 300, 301, 312, or 313, a variant, derivative, orthologue, paralogue or homologue thereof, in which:

[0590] the amino acid at Mutated site 4 is Val, and the amino acid at Mutated site 5 is Leu.

[0591] In another preferred embodiment, the mutated PPO comprises a sequence of SEQ ID NO: 1, 2, 3, 4, 5, 6, 7, 8, 9, 10, 11, 12, 13, 14, 15, 16, 17, 18, 19, 20, 21, 22, 23, 24, 25, 26, 27, 28, 29, 30, 31, 32, 33, 34, 35, 36, 37, 38, 39, 40, 41, 42, 43, 44, 45, 46, 47, 48, 49, 50, 51, 52, 53, 54, 55, 56, 57, 58, 59, 60, 61, 62, 63, 64, 65, 66, 67, 68, 69, 70, 71, 72, 73, 74, 75, 76, 77, 78, 79, 80, 81, 82, 83, 84, 85, 86, 87, 88, 89, 90, 91, 92, 93, 94, 95, 96, 97, 98, 99, 100, 101, 102, 103, 104, 105, 106, 107, 108, 109, 110, 111, 112, 113, 114, 115, 116, 117, 118, 119, 120, 121, 122, 123, 124, 125, 126, 127, 128, 129, 130, 131, 132, 133, 134, 135, 136, 137, 138, 139, 140, 141, 142, 143, 144, 145, 146, 147, 148, 149, 150, 151, 152, 153, 154, 155, 156, 157, 158, 159, 160, 161, 162, 163, 164, 165, 166, 167, 168, 169, 170, 171, 172, 173, 174, 175, 176, 177, 178, 179, 180, 181, 182, 183, 184, 185, 186, 187, 188, 189, 190, 191, 192, 193, 194, 195, 196, 197, 198, 199, 200, 201, 202, 203, 204, 205, 206, 207, 208, 209, 210, 211, 212, 213, 214, 215, 216, 217, 218, 219, 220, 221, 222, 223, 224, 225, 226, 227, 228, 229, 230, 231, 232, 233, 234, 235, 236, 237, 238, 239, 240, 241, 242, 243, 244, 245, 246, 247, 248, 249, 250, 251, 252, 253, 254, 255, 256, 257, 258, 259, 260, 261, 262, 263, 264, 265, 266, 267, 268, 269, 270, 271, 272, 273, 274, 275, 276, 277, 278, 279, 280, 281, 282, 283, 284, 285, 286, 287, 288, 289, 290, 291, 292, 293, 294, 295, 296, 297, 298, 299, 300, 301, 312, or 313, a variant, derivative, orthologue, paralogue or homologue thereof, in which:

[0592] the amino acid at Mutated site 4 is Val, and the amino acid at Mutated site 5 is Val.

[0593] In another preferred embodiment, the mutated PPO comprises a sequence of SEQ ID NO: 1, 2, 3, 4, 5, 6, 7, 8, 9, 10, 11, 12, 13, 14, 15, 16, 17, 18, 19, 20, 21, 22, 23, 24, 25, 26, 27, 28, 29, 30, 31, 32, 33, 34, 35, 36, 37, 38, 39, 40, 41, 42, 43, 44, 45, 46, 47, 48, 49, 50, 51, 52, 53, 54, 55, 56, 57, 58, 59, 60, 61, 62, 63, 64, 65, 66, 67, 68, 69, 70, 71, 72, 73, 74, 75, 76, 77, 78, 79, 80, 81, 82, 83, 84, 85, 86, 87, 88, 89, 90, 91, 92, 93, 94, 95, 96, 97, 98, 99, 100, 101, 102, 103, 104, 105, 106, 107, 108, 109, 110, 111, 112, 113, 114, 115, 116, 117, 118, 119, 120, 121, 122, 123, 124, 125, 126, 127, 128, 129, 130, 131, 132, 133, 134, 135, 136, 137, 138, 139, 140, 141, 142, 143, 144, 145, 146, 147, 148, 149, 150, 151, 152, 153, 154, 155, 156, 157, 158, 159, 160, 161, 162, 163, 164, 165, 166, 167, 168, 169, 170, 171, 172, 173, 174, 175, 176, 177, 178, 179, 180, 181, 182, 183, 184, 185, 186, 187, 188, 189, 190, 191, 192, 193, 194, 195, 196, 197, 198, 199, 200, 201, 202, 203, 204, 205, 206, 207, 208, 209, 210, 211, 212, 213, 214, 215, 216, 217, 218, 219, 220, 221, 222, 223, 224, 225, 226, 227, 228, 229, 230, 231, 232, 233, 234, 235, 236, 237, 238, 239, 240, 241, 242, 243, 244, 245, 246, 247, 248, 249, 250, 251, 252, 253, 254, 255, 256, 257, 258, 259, 260, 261, 262, 263, 264, 265, 266, 267, 268, 269, 270, 271, 272, 273, 274, 275, 276, 277, 278, 279, 280, 281, 282, 283, 284, 285, 286, 287, 288, 289, 290, 291, 292, 293, 294, 295, 296, 297, 298, 299, 300, 301, 312, or 313, a variant, derivative, orthologue, paralogue or homologue thereof, in which:

[0594] the amino acid at Mutated site 4 is Val, and the amino acid at Mutated site 5 is Ile.

[0595] In another preferred embodiment, the mutated PPO comprises a sequence of SEQ ID NO: 1, 2, 3, 4, 5, 6, 7, 8, 9, 10, 11, 12, 13, 14, 15, 16, 17, 18, 19, 20, 21, 22, 23, 24, 25, 26, 27, 28, 29, 30, 31, 32, 33, 34, 35, 36, 37, 38, 39, 40, 41, 42, 43, 44, 45, 46, 47, 48, 49, 50, 51, 52, 53, 54, 55, 56, 57, 58, 59, 60, 61, 62, 63, 64, 65, 66, 67, 68, 69, 70, 71, 72, 73, 74, 75, 76, 77, 78, 79, 80, 81, 82, 83, 84, 85, 86, 87, 88, 89, 90, 91, 92, 93, 94, 95, 96, 97, 98, 99, 100, 101, 102, 103, 104, 105, 106, 107, 108, 109, 110, 111, 112, 113, 114, 115, 116, 117, 118, 119, 120, 121, 122, 123, 124, 125, 126, 127, 128, 129, 130, 131, 132, 133, 134, 135, 136, 137, 138, 139, 140, 141, 142, 143, 144, 145, 146, 147, 148, 149, 150, 151, 152, 153, 154, 155, 156, 157, 158, 159, 160, 161, 162, 163, 164, 165, 166, 167, 168, 169, 170, 171, 172, 173, 174, 175, 176, 177, 178, 179, 180, 181, 182, 183, 184, 185, 186, 187, 188, 189, 190, 191, 192, 193, 194, 195, 196, 197, 198, 199, 200, 201, 202, 203, 204, 205, 206, 207, 208, 209, 210, 211, 212, 213, 214, 215, 216, 217, 218, 219, 220, 221, 222, 223, 224, 225, 226, 227, 228, 229, 230, 231, 232, 233, 234, 235, 236, 237, 238, 239, 240, 241, 242, 243, 244, 245, 246, 247, 248, 249, 250, 251, 252, 253, 254, 255, 256, 257, 258, 259, 260, 261, 262, 263, 264, 265, 266, 267, 268, 269, 270, 271, 272, 273, 274, 275, 276, 277, 278, 279, 280, 281, 282, 283, 284, 285, 286, 287, 288, 289, 290, 291, 292, 293, 294, 295, 296, 297, 298, 299, 300, 301, 312, or 313, a variant, derivative, orthologue, paralogue or homologue thereof, in which:

[0596] the amino acid at Mutated site 4 is Val, and the amino acid at Mutated site 5 is Met.

[0597] In another preferred embodiment, the mutated PPO comprises a sequence of SEQ ID NO: 1, 2, 3, 4, 5, 6, 7, 8, 9, 10, 11, 12, 13, 14, 15, 16, 17, 18, 19, 20, 21, 22, 23, 24, 25, 26, 27, 28, 29, 30, 31, 32, 33, 34, 35, 36, 37, 38, 39, 40, 41, 42, 43, 44, 45, 46, 47, 48, 49, 50, 51, 52, 53, 54, 55, 56, 57, 58, 59, 60, 61, 62, 63, 64, 65, 66, 67, 68, 69, 70, 71, 72, 73, 74, 75, 76, 77, 78, 79, 80, 81, 82, 83, 84, 85, 86, 87, 88, 89, 90, 91, 92, 93, 94, 95, 96, 97, 98, 99, 100, 101, 102, 103, 104, 105, 106, 107, 108, 109, 110, 111, 112, 113, 114, 115, 116, 117, 118, 119, 120, 121, 122, 123, 124, 125, 126, 127, 128, 129, 130, 131, 132, 133, 134, 135, 136, 137, 138, 139, 140, 141, 142, 143, 144, 145, 146, 147, 148, 149, 150, 151, 152, 153, 154, 155, 156, 157, 158, 159, 160, 161, 162, 163, 164, 165, 166, 167, 168, 169, 170, 171, 172, 173, 174, 175, 176, 177, 178, 179, 180, 181, 182, 183, 184, 185, 186, 187, 188, 189, 190, 191, 192, 193, 194, 195, 196, 197, 198, 199, 200, 201, 202, 203, 204, 205, 206, 207, 208, 209, 210, 211, 212, 213, 214, 215, 216, 217, 218, 219, 220, 221, 222, 223, 224, 225, 226, 227, 228, 229, 230, 231, 232, 233, 234, 235, 236, 237, 238, 239, 240, 241, 242, 243, 244, 245, 246, 247, 248, 249, 250, 251, 252, 253, 254, 255, 256, 257, 258, 259, 260, 261, 262, 263, 264, 265, 266, 267, 268, 269, 270, 271, 272, 273, 274, 275, 276, 277, 278, 279, 280, 281, 282, 283, 284, 285, 286, 287, 288, 289, 290, 291, 292, 293, 294, 295, 296, 297, 298, 299, 300, 301, 312, or 313, a variant, derivative, orthologue, paralogue or homologue thereof, in which:

[0598] the amino acid at Mutated site 4 is Val, and the amino acid at Mutated site 5 is His.

[0599] In another preferred embodiment, the mutated PPO comprises a sequence of SEQ ID NO: 1, 2, 3, 4, 5, 6, 7, 8, 9, 10, 11, 12, 13, 14, 15, 16, 17, 18, 19, 20, 21, 22, 23, 24, 25, 26, 27, 28, 29, 30, 31, 32, 33, 34, 35, 36, 37, 38, 39, 40, 41, 42, 43, 44, 45, 46, 47, 48, 49, 50, 51, 52, 53, 54, 55, 56, 57, 58, 59, 60, 61, 62, 63, 64, 65, 66, 67, 68, 69, 70, 71, 72, 73, 74, 75, 76, 77, 78, 79, 80, 81, 82, 83, 84, 85, 86, 87, 88, 89, 90, 91, 92, 93, 94, 95, 96, 97, 98, 99, 100, 101, 102, 103, 104, 105, 106, 107, 108, 109, 110, 111, 112, 113, 114, 115, 116, 117, 118, 119, 120, 121, 122, 123, 124, 125, 126, 127, 128, 129, 130, 131, 132, 133, 134, 135, 136, 137, 138, 139, 140, 141, 142, 143, 144, 145, 146, 147, 148, 149, 150, 151, 152, 153, 154, 155, 156, 157, 158, 159, 160, 161, 162, 163, 164, 165, 166, 167, 168, 169, 170, 171, 172, 173, 174, 175, 176, 177, 178, 179, 180, 181, 182, 183, 184, 185, 186, 187, 188, 189, 190, 191, 192, 193, 194, 195, 196, 197, 198, 199, 200, 201, 202, 203, 204, 205, 206, 207, 208, 209, 210, 211, 212, 213, 214, 215, 216, 217, 218, 219, 220, 221, 222, 223, 224, 225, 226, 227, 228, 229, 230, 231, 232, 233, 234, 235, 236, 237, 238, 239, 240, 241, 242, 243, 244, 245, 246, 247, 248, 249, 250, 251, 252, 253, 254, 255, 256, 257, 258, 259, 260, 261, 262, 263, 264, 265, 266, 267, 268, 269, 270, 271, 272, 273, 274, 275, 276, 277, 278, 279, 280, 281, 282, 283, 284, 285, 286, 287, 288, 289, 290, 291, 292, 293, 294, 295, 296, 297, 298, 299, 300, 301, 312, or 313, a variant, derivative, orthologue, paralogue or homologue thereof, in which:

[0600] the amino acid at Mutated site 4 is Val, and the amino acid at Mutated site 5 is Lys.

[0601] In another preferred embodiment, the mutated PPO comprises a sequence of SEQ ID NO: 1, 2, 3, 4, 5, 6, 7, 8, 9, 10, 11, 12, 13, 14, 15, 16, 17, 18, 19, 20, 21, 22, 23, 24, 25, 26, 27, 28, 29, 30, 31, 32, 33, 34, 35, 36, 37, 38, 39, 40, 41, 42, 43, 44, 45, 46, 47, 48, 49, 50, 51, 52, 53, 54, 55, 56, 57, 58, 59, 60, 61, 62, 63, 64, 65, 66, 67, 68, 69, 70, 71, 72, 73, 74, 75, 76, 77, 78, 79, 80, 81, 82, 83, 84, 85, 86, 87, 88, 89, 90, 91, 92, 93, 94, 95, 96, 97, 98, 99, 100, 101, 102, 103, 104, 105, 106, 107, 108, 109, 110, 111, 112, 113, 114, 115, 116, 117, 118, 119, 120, 121, 122, 123, 124, 125, 126, 127, 128, 129, 130, 131, 132, 133, 134, 135, 136, 137, 138, 139, 140, 141, 142, 143, 144, 145, 146, 147, 148, 149, 150, 151, 152, 153, 154, 155, 156, 157, 158, 159, 160, 161, 162, 163, 164, 165, 166, 167, 168, 169, 170, 171, 172, 173, 174, 175, 176, 177, 178, 179, 180, 181, 182, 183, 184, 185, 186, 187, 188, 189, 190, 191, 192, 193, 194, 195, 196, 197, 198, 199, 200, 201, 202, 203, 204, 205, 206, 207, 208, 209, 210, 211, 212, 213, 214, 215, 216, 217, 218, 219, 220, 221, 222, 223, 224, 225, 226, 227, 228, 229, 230, 231, 232, 233, 234, 235, 236, 237, 238, 239, 240, 241, 242, 243, 244, 245, 246, 247, 248, 249, 250, 251, 252, 253, 254, 255, 256, 257, 258, 259, 260, 261, 262, 263, 264, 265, 266, 267, 268, 269, 270, 271, 272, 273, 274, 275, 276, 277, 278, 279, 280, 281, 282, 283, 284, 285, 286, 287, 288, 289, 290, 291, 292, 293, 294, 295, 296, 297, 298, 299, 300, 301, 312, or 313, a variant, derivative, orthologue, paralogue or homologue thereof, in which:

[0602] the amino acid at Mutated site 4 is Val, and the amino acid at Mutated site 5 is Asp.

[0603] In another preferred embodiment, the mutated PPO comprises a sequence of SEQ ID NO: 1, 2, 3, 4, 5, 6, 7, 8, 9, 10, 11, 12, 13, 14, 15, 16, 17, 18, 19, 20, 21, 22, 23, 24, 25, 26, 27, 28, 29, 30, 31, 32, 33, 34, 35, 36, 37, 38, 39, 40, 41, 42, 43, 44, 45, 46, 47, 48, 49, 50, 51, 52, 53, 54, 55, 56, 57, 58, 59, 60, 61, 62, 63, 64, 65, 66, 67, 68, 69, 70, 71, 72, 73, 74, 75, 76, 77, 78, 79, 80, 81, 82, 83, 84, 85, 86, 87, 88, 89, 90, 91, 92, 93, 94, 95, 96, 97, 98, 99, 100, 101, 102, 103, 104, 105, 106, 107, 108, 109, 110, 111, 112, 113, 114, 115, 116, 117, 118, 119, 120, 121, 122, 123, 124, 125, 126, 127, 128, 129, 130, 131, 132, 133, 134, 135, 136, 137, 138, 139, 140, 141, 142, 143, 144, 145, 146, 147, 148, 149, 150, 151, 152, 153, 154, 155, 156, 157, 158, 159, 160, 161, 162, 163, 164, 165, 166, 167, 168, 169, 170, 171, 172, 173, 174, 175, 176, 177, 178, 179, 180, 181, 182, 183, 184, 185, 186, 187, 188, 189, 190, 191, 192, 193, 194, 195, 196, 197, 198, 199, 200, 201, 202, 203, 204, 205, 206, 207, 208, 209, 210, 211, 212, 213, 214, 215, 216, 217, 218, 219, 220, 221, 222, 223, 224, 225, 226, 227, 228, 229, 230, 231, 232, 233, 234, 235, 236, 237, 238, 239, 240, 241, 242, 243, 244, 245, 246, 247, 248, 249, 250, 251, 252, 253, 254, 255, 256, 257, 258, 259, 260, 261, 262, 263, 264, 265, 266, 267, 268, 269, 270, 271, 272, 273, 274, 275, 276, 277, 278, 279, 280, 281, 282, 283, 284, 285, 286, 287, 288, 289, 290, 291, 292, 293, 294, 295, 296, 297, 298, 299, 300, 301, 312, or 313, a variant, derivative, orthologue, paralogue or homologue thereof, in which:

[0604] the amino acid at Mutated site 4 is Val, and the amino acid at Mutated site 5 is Glu.

[0605] In another preferred embodiment, the mutated PPO comprises a sequence of SEQ ID NO: 1, 2, 3, 4, 5, 6, 7, 8, 9, 10, 11, 12, 13, 14, 15, 16, 17, 18, 19, 20, 21, 22, 23, 24, 25, 26, 27, 28, 29, 30, 31, 32, 33, 34, 35, 36, 37, 38, 39, 40, 41, 42, 43, 44, 45, 46, 47, 48, 49, 50, 51, 52, 53, 54, 55, 56, 57, 58, 59, 60, 61, 62, 63, 64, 65, 66, 67, 68, 69, 70, 71, 72, 73, 74, 75, 76, 77, 78, 79, 80, 81, 82, 83, 84, 85, 86, 87, 88, 89, 90, 91, 92, 93, 94, 95, 96, 97, 98, 99, 100, 101, 102, 103, 104, 105, 106, 107, 108, 109, 110, 111, 112, 113, 114, 115, 116, 117, 118, 119, 120, 121, 122, 123, 124, 125, 126, 127, 128, 129, 130, 131, 132, 133, 134, 135, 136, 137, 138, 139, 140, 141, 142, 143, 144, 145, 146, 147, 148, 149, 150, 151, 152, 153, 154, 155, 156, 157, 158, 159, 160, 161, 162, 163, 164, 165, 166, 167, 168, 169, 170, 171, 172, 173, 174, 175, 176, 177, 178, 179, 180, 181, 182, 183, 184, 185, 186, 187, 188, 189, 190, 191, 192, 193, 194, 195, 196, 197, 198, 199, 200, 201, 202, 203, 204, 205, 206, 207, 208, 209, 210, 211, 212, 213, 214, 215, 216, 217, 218, 219, 220, 221, 222, 223, 224, 225, 226, 227, 228, 229, 230, 231, 232, 233, 234, 235, 236, 237, 238, 239, 240, 241, 242, 243, 244, 245, 246, 247, 248, 249, 250, 251, 252, 253, 254, 255, 256, 257, 258, 259, 260, 261, 262, 263, 264, 265, 266, 267, 268, 269, 270, 271, 272, 273, 274, 275, 276, 277, 278, 279, 280, 281, 282, 283, 284, 285, 286, 287, 288, 289, 290, 291, 292, 293, 294, 295, 296, 297, 298, 299, 300, 301, 312, or 313, a variant, derivative, orthologue, paralogue or homologue thereof, in which:

[0606] the amino acid at Mutated site 4 is Val, and the amino acid at Mutated site 5 is Ser.

[0607] In another preferred embodiment, the mutated PPO comprises a sequence of SEQ ID NO: 1, 2, 3, 4, 5, 6, 7, 8, 9, 10, 11, 12, 13, 14, 15, 16, 17, 18, 19, 20, 21, 22, 23, 24, 25, 26, 27, 28, 29, 30, 31, 32, 33, 34, 35, 36, 37, 38, 39, 40, 41, 42, 43, 44, 45, 46, 47, 48, 49, 50, 51, 52, 53, 54, 55, 56, 57, 58, 59, 60, 61, 62, 63, 64, 65, 66, 67, 68, 69, 70, 71, 72, 73, 74, 75, 76, 77, 78, 79, 80, 81, 82, 83, 84, 85, 86, 87, 88, 89, 90, 91, 92, 93, 94, 95, 96, 97, 98, 99, 100, 101, 102, 103, 104, 105, 106, 107, 108, 109, 110, 111, 112, 113, 114, 115, 116, 117, 118, 119, 120, 121, 122, 123, 124, 125, 126, 127, 128, 129, 130, 131, 132, 133, 134, 135, 136, 137, 138, 139, 140, 141, 142, 143, 144, 145, 146, 147, 148, 149, 150, 151, 152, 153, 154, 155, 156, 157, 158, 159, 160, 161, 162, 163, 164, 165, 166, 167, 168, 169, 170, 171, 172, 173, 174, 175, 176, 177, 178, 179, 180, 181, 182, 183, 184, 185, 186, 187, 188, 189, 190, 191, 192, 193, 194, 195, 196, 197, 198, 199, 200, 201, 202, 203, 204, 205, 206, 207, 208, 209, 210, 211, 212, 213, 214, 215, 216, 217, 218, 219, 220, 221, 222, 223, 224, 225, 226, 227, 228, 229, 230, 231, 232, 233, 234, 235, 236, 237, 238, 239, 240, 241, 242, 243, 244, 245, 246, 247, 248, 249, 250, 251, 252, 253, 254, 255, 256, 257, 258, 259, 260, 261, 262, 263, 264, 265, 266, 267, 268, 269, 270, 271, 272, 273, 274, 275, 276, 277, 278, 279, 280, 281, 282, 283, 284, 285, 286, 287, 288, 289, 290, 291, 292, 293, 294, 295, 296, 297, 298, 299, 300, 301, 312, or 313, a variant, derivative, orthologue, paralogue or homologue thereof, in which:

[0608] the amino acid at Mutated site 4 is Val, and the amino acid at Mutated site 5 is Thr.

[0609] In another preferred embodiment, the mutated PPO comprises a sequence of SEQ ID NO: 1, 2, 3, 4, 5, 6, 7, 8, 9, 10, 11, 12, 13, 14, 15, 16, 17, 18, 19, 20, 21, 22, 23, 24, 25, 26, 27, 28, 29, 30, 31, 32, 33, 34, 35, 36, 37, 38, 39, 40, 41, 42, 43, 44, 45, 46, 47, 48, 49, 50, 51, 52, 53, 54, 55, 56, 57, 58, 59, 60, 61, 62, 63, 64, 65, 66, 67, 68, 69, 70, 71, 72, 73, 74, 75, 76, 77, 78, 79, 80, 81, 82, 83, 84, 85, 86, 87, 88, 89, 90, 91, 92, 93, 94, 95, 96, 97, 98, 99, 100, 101, 102, 103, 104, 105, 106, 107, 108, 109, 110, 111, 112, 113, 114, 115, 116, 117, 118, 119, 120, 121, 122, 123, 124, 125, 126, 127, 128, 129, 130, 131, 132, 133, 134, 135, 136, 137, 138, 139, 140, 141, 142, 143, 144, 145, 146, 147, 148, 149, 150, 151, 152, 153, 154, 155, 156, 157, 158, 159, 160, 161, 162, 163, 164, 165, 166, 167, 168, 169, 170, 171, 172, 173, 174, 175, 176, 177, 178, 179, 180, 181, 182, 183, 184, 185, 186, 187, 188, 189, 190, 191, 192, 193, 194, 195, 196, 197, 198, 199, 200, 201, 202, 203, 204, 205, 206, 207, 208, 209, 210, 211, 212, 213, 214, 215, 216, 217, 218, 219, 220, 221, 222, 223, 224, 225, 226, 227, 228, 229, 230, 231, 232, 233, 234, 235, 236, 237, 238, 239, 240, 241, 242, 243, 244, 245, 246, 247, 248, 249, 250, 251, 252, 253, 254, 255, 256, 257, 258, 259, 260, 261, 262, 263, 264, 265, 266, 267, 268, 269, 270, 271, 272, 273, 274, 275, 276, 277, 278, 279, 280, 281, 282, 283, 284, 285, 286, 287, 288, 289, 290, 291, 292, 293, 294, 295, 296, 297, 298, 299, 300, 301, 312, or 313, a variant, derivative, orthologue, paralogue or homologue thereof, in which:

[0610] the amino acid at Mutated site 4 is Val, and the amino acid at Mutated site 5 is Asn.

[0611] In another preferred embodiment, the mutated PPO comprises a sequence of SEQ ID NO: 1, 2, 3, 4, 5, 6, 7, 8, 9, 10, 11, 12, 13, 14, 15, 16, 17, 18, 19, 20, 21, 22, 23, 24, 25, 26, 27, 28, 29, 30, 31, 32, 33, 34, 35, 36, 37, 38, 39, 40, 41, 42, 43, 44, 45, 46, 47, 48, 49, 50, 51, 52, 53, 54, 55, 56, 57, 58, 59, 60, 61, 62, 63, 64, 65, 66, 67, 68, 69, 70, 71, 72, 73, 74, 75, 76, 77, 78, 79, 80, 81, 82, 83, 84, 85, 86, 87, 88, 89, 90, 91, 92, 93, 94, 95, 96, 97, 98, 99, 100, 101, 102, 103, 104, 105, 106, 107, 108, 109, 110, 111, 112, 113, 114, 115, 116, 117, 118, 119, 120, 121, 122, 123, 124, 125, 126, 127, 128, 129, 130, 131, 132, 133, 134, 135, 136, 137, 138, 139, 140, 141, 142, 143, 144, 145, 146, 147, 148, 149, 150, 151, 152, 153, 154, 155, 156, 157, 158, 159, 160, 161, 162, 163, 164, 165, 166, 167, 168, 169, 170, 171, 172, 173, 174, 175, 176, 177, 178, 179, 180, 181, 182, 183, 184, 185, 186, 187, 188, 189, 190, 191, 192, 193, 194, 195, 196, 197, 198, 199, 200, 201, 202, 203, 204, 205, 206, 207, 208, 209, 210, 211, 212, 213, 214, 215, 216, 217, 218, 219, 220, 221, 222, 223, 224, 225, 226, 227, 228, 229, 230, 231, 232, 233, 234, 235, 236, 237, 238, 239, 240, 241, 242, 243, 244, 245, 246, 247, 248, 249, 250, 251, 252, 253, 254, 255, 256, 257, 258, 259, 260, 261, 262, 263, 264, 265, 266, 267, 268, 269, 270, 271, 272, 273, 274, 275, 276, 277, 278, 279, 280, 281, 282, 283, 284, 285, 286, 287, 288, 289, 290, 291, 292, 293, 294, 295, 296, 297, 298, 299, 300, 301, 312, or 313, a variant, derivative, orthologue, paralogue or homologue thereof, in which:

[0612] the amino acid at Mutated site 4 is Val, and the amino acid at Mutated site 5 is Gin.

[0613] In another preferred embodiment, the mutated PPO comprises a sequence of SEQ ID NO: 1, 2, 3, 4, 5, 6, 7, 8, 9, 10, 11, 12, 13, 14, 15, 16, 17, 18, 19, 20, 21, 22, 23, 24, 25, 26, 27, 28, 29, 30, 31, 32, 33, 34, 35, 36, 37, 38, 39, 40, 41, 42, 43, 44, 45, 46, 47, 48, 49, 50, 51, 52, 53, 54, 55, 56, 57, 58, 59, 60, 61, 62, 63, 64, 65, 66, 67, 68, 69, 70, 71, 72, 73, 74, 75, 76, 77, 78, 79, 80, 81, 82, 83, 84, 85, 86, 87, 88, 89, 90, 91, 92, 93, 94, 95, 96, 97, 98, 99, 100, 101, 102, 103, 104, 105, 106, 107, 108, 109, 110, 111, 112, 113, 114, 115, 116, 117, 118, 119, 120, 121, 122, 123, 124, 125, 126, 127, 128, 129, 130, 131, 132, 133, 134, 135, 136, 137, 138, 139, 140, 141, 142, 143, 144, 145, 146, 147, 148, 149, 150, 151, 152, 153, 154, 155, 156, 157, 158, 159, 160, 161, 162, 163, 164, 165, 166, 167, 168, 169, 170, 171, 172, 173, 174, 175, 176, 177, 178, 179, 180, 181, 182, 183, 184, 185, 186, 187, 188, 189, 190, 191, 192, 193, 194, 195, 196, 197, 198, 199, 200, 201, 202, 203, 204, 205, 206, 207, 208, 209, 210, 211, 212, 213, 214, 215, 216, 217, 218, 219, 220, 221, 222, 223, 224, 225, 226, 227, 228, 229, 230, 231, 232, 233, 234, 235, 236, 237, 238, 239, 240, 241, 242, 243, 244, 245, 246, 247, 248, 249, 250, 251, 252, 253, 254, 255, 256, 257, 258, 259, 260, 261, 262, 263, 264, 265, 266, 267, 268, 269, 270, 271, 272, 273, 274, 275, 276, 277, 278, 279, 280, 281, 282, 283, 284, 285, 286, 287, 288, 289, 290, 291, 292, 293, 294, 295, 296, 297, 298, 299, 300, 301, 312, or 313, a variant, derivative, orthologue, paralogue or homologue thereof, in which:

[0614] the amino acid at Mutated site 4 is Val, and the amino acid at Mutated site 5 is Cys.

[0615] In another preferred embodiment, the mutated PPO comprises a sequence of SEQ ID NO: 1, 2, 3, 4, 5, 6, 7, 8, 9, 10, 11, 12, 13, 14, 15, 16, 17, 18, 19, 20, 21, 22, 23, 24, 25, 26, 27, 28, 29, 30, 31, 32, 33, 34, 35, 36, 37, 38, 39, 40, 41, 42, 43, 44, 45, 46, 47, 48, 49, 50, 51, 52, 53, 54, 55, 56, 57, 58, 59, 60, 61, 62, 63, 64, 65, 66, 67, 68, 69, 70, 71, 72, 73, 74, 75, 76, 77, 78, 79, 80, 81, 82, 83, 84, 85, 86, 87, 88, 89, 90, 91, 92, 93, 94, 95, 96, 97, 98, 99, 100, 101, 102, 103, 104, 105, 106, 107, 108, 109, 110, 111, 112, 113, 114, 115, 116, 117, 118, 119, 120, 121, 122, 123, 124, 125, 126, 127, 128, 129, 130, 131, 132, 133, 134, 135, 136, 137, 138, 139, 140, 141, 142, 143, 144, 145, 146, 147, 148, 149, 150, 151, 152, 153, 154, 155, 156, 157, 158, 159, 160, 161, 162, 163, 164, 165, 166, 167, 168, 169, 170, 171, 172, 173, 174, 175, 176, 177, 178, 179, 180, 181, 182, 183, 184, 185, 186, 187, 188, 189, 190, 191, 192, 193, 194, 195, 196, 197, 198, 199, 200, 201, 202, 203, 204, 205, 206, 207, 208, 209, 210, 211, 212, 213, 214, 215, 216, 217, 218, 219, 220, 221, 222, 223, 224, 225, 226, 227, 228, 229, 230, 231, 232, 233, 234, 235, 236, 237, 238, 239, 240, 241, 242, 243, 244, 245, 246, 247, 248, 249, 250, 251, 252, 253, 254, 255, 256, 257, 258, 259, 260, 261, 262, 263, 264, 265, 266, 267, 268, 269, 270, 271, 272, 273, 274, 275, 276, 277, 278, 279, 280, 281, 282, 283, 284, 285, 286, 287, 288, 289, 290, 291, 292, 293, 294, 295, 296, 297, 298, 299, 300, 301, 312, or 313, a variant, derivative, orthologue, paralogue or homologue thereof, in which:

[0616] the amino acid at Mutated site 4 is Val, and the amino acid at Mutated site 5 is Gly.

[0617] In another preferred embodiment, the mutated PPO comprises a sequence of SEQ ID NO: 1, 2, 3, 4, 5, 6, 7, 8, 9, 10, 11, 12, 13, 14, 15, 16, 17, 18, 19, 20, 21, 22, 23, 24, 25, 26, 27, 28, 29, 30, 31, 32, 33, 34, 35, 36, 37, 38, 39, 40, 41, 42, 43, 44, 45, 46, 47, 48, 49, 50, 51, 52, 53, 54, 55, 56, 57, 58, 59, 60, 61, 62, 63, 64, 65, 66, 67, 68, 69, 70, 71, 72, 73, 74, 75, 76, 77, 78, 79, 80, 81, 82, 83, 84, 85, 86, 87, 88, 89, 90, 91, 92, 93, 94, 95, 96, 97, 98, 99, 100, 101, 102, 103, 104, 105, 106, 107, 108, 109, 110, 111, 112, 113, 114, 115, 116, 117, 118, 119, 120, 121, 122, 123, 124, 125, 126, 127, 128, 129, 130, 131, 132, 133, 134, 135, 136, 137, 138, 139, 140, 141, 142, 143, 144, 145, 146, 147, 148, 149, 150, 151, 152, 153, 154, 155, 156, 157, 158, 159, 160, 161, 162, 163, 164, 165, 166, 167, 168, 169, 170, 171, 172, 173, 174, 175, 176, 177, 178, 179, 180, 181, 182, 183, 184, 185, 186, 187, 188, 189, 190, 191, 192, 193, 194, 195, 196, 197, 198, 199, 200, 201, 202, 203, 204, 205, 206, 207, 208, 209, 210, 211, 212, 213, 214, 215, 216, 217, 218, 219, 220, 221, 222, 223, 224, 225, 226, 227, 228, 229, 230, 231, 232, 233, 234, 235, 236, 237, 238, 239, 240, 241, 242, 243, 244, 245, 246, 247, 248, 249, 250, 251, 252, 253, 254, 255, 256, 257, 258, 259, 260, 261, 262, 263, 264, 265, 266, 267, 268, 269, 270, 271, 272, 273, 274, 275, 276, 277, 278, 279, 280, 281, 282, 283, 284, 285, 286, 287, 288, 289, 290, 291, 292, 293, 294, 295, 296, 297, 298, 299, 300, 301, 312, or 313, a variant, derivative, orthologue, paralogue or homologue thereof, in which:

[0618] the amino acid at Mutated site 4 is Val, and the amino acid at Mutated site 5 is Pro.

[0619] In another preferred embodiment, the mutated PPO comprises a sequence of SEQ ID NO: 1, 2, 3, 4, 5, 6, 7, 8, 9, 10, 11, 12, 13, 14, 15, 16, 17, 18, 19, 20, 21, 22, 23, 24, 25, 26, 27, 28, 29, 30, 31, 32, 33, 34, 35, 36, 37, 38, 39, 40, 41, 42, 43, 44, 45, 46, 47, 48, 49, 50, 51, 52, 53, 54, 55, 56, 57, 58, 59, 60, 61, 62, 63, 64, 65, 66, 67, 68, 69, 70, 71, 72, 73, 74, 75, 76, 77, 78, 79, 80, 81, 82, 83, 84, 85, 86, 87, 88, 89, 90, 91, 92, 93, 94, 95, 96, 97, 98, 99, 100, 101, 102, 103, 104, 105, 106, 107, 108, 109, 110, 111, 112, 113, 114, 115, 116, 117, 118, 119, 120, 121, 122, 123, 124, 125, 126, 127, 128, 129, 130, 131, 132, 133, 134, 135, 136, 137, 138, 139, 140, 141, 142, 143, 144, 145, 146, 147, 148, 149, 150, 151, 152, 153, 154, 155, 156, 157, 158, 159, 160, 161, 162, 163, 164, 165, 166, 167, 168, 169, 170, 171, 172, 173, 174, 175, 176, 177, 178, 179, 180, 181, 182, 183, 184, 185, 186, 187, 188, 189, 190, 191, 192, 193, 194, 195, 196, 197, 198, 199, 200, 201, 202, 203, 204, 205, 206, 207, 208, 209, 210, 211, 212, 213, 214, 215, 216, 217, 218, 219, 220, 221, 222, 223, 224, 225, 226, 227, 228, 229, 230, 231, 232, 233, 234, 235, 236, 237, 238, 239, 240, 241, 242, 243, 244, 245, 246, 247, 248, 249, 250, 251, 252, 253, 254, 255, 256, 257, 258, 259, 260, 261, 262, 263, 264, 265, 266, 267, 268, 269, 270, 271, 272, 273, 274, 275, 276, 277, 278, 279, 280, 281, 282, 283, 284, 285, 286, 287, 288, 289, 290, 291, 292, 293, 294, 295, 296, 297, 298, 299, 300, 301, 312, or 313, a variant, derivative, orthologue, paralogue or homologue thereof, in which:

[0620] the amino acid at Mutated site 4 is Val, and the amino acid at Mutated site 5 is Arg.

[0621] In another preferred embodiment, the mutated PPO comprises a sequence of SEQ ID NO: 1, 2, 3, 4, 5, 6, 7, 8, 9, 10, 11, 12, 13, 14, 15, 16, 17, 18, 19, 20, 21, 22, 23, 24, 25, 26, 27, 28, 29, 30, 31, 32, 33, 34, 35, 36, 37, 38, 39, 40, 41, 42, 43, 44, 45, 46, 47, 48, 49, 50, 51, 52, 53, 54, 55, 56, 57, 58, 59, 60, 61, 62, 63, 64, 65, 66, 67, 68, 69, 70, 71, 72, 73, 74, 75, 76, 77, 78, 79, 80, 81, 82, 83, 84, 85, 86, 87, 88, 89, 90, 91, 92, 93, 94, 95, 96, 97, 98, 99, 100, 101, 102, 103, 104, 105, 106, 107, 108, 109, 110, 111, 112, 113, 114, 115, 116, 117, 118, 119, 120, 121, 122, 123, 124, 125, 126, 127, 128, 129, 130, 131, 132, 133, 134, 135, 136, 137, 138, 139, 140, 141, 142, 143, 144, 145, 146, 147, 148, 149, 150, 151, 152, 153, 154, 155, 156, 157, 158, 159, 160, 161, 162, 163, 164, 165, 166, 167, 168, 169, 170, 171, 172, 173, 174, 175, 176, 177, 178, 179, 180, 181, 182, 183, 184, 185, 186, 187, 188, 189, 190, 191, 192, 193, 194, 195, 196, 197, 198, 199, 200, 201, 202, 203, 204, 205, 206, 207, 208, 209, 210, 211, 212, 213, 214, 215, 216, 217, 218, 219, 220, 221, 222, 223, 224, 225, 226, 227, 228, 229, 230, 231, 232, 233, 234, 235, 236, 237, 238, 239, 240, 241, 242, 243, 244, 245, 246, 247, 248, 249, 250, 251, 252, 253, 254, 255, 256, 257, 258, 259, 260, 261, 262, 263, 264, 265, 266, 267, 268, 269, 270, 271, 272, 273, 274, 275, 276, 277, 278, 279, 280, 281, 282, 283, 284, 285, 286, 287, 288, 289, 290, 291, 292, 293, 294, 295, 296, 297, 298, 299, 300, 301, 312, or 313, a variant, derivative, orthologue, paralogue or homologue thereof, in which:

[0622] the amino acid at Mutated site 4 is Val, and the amino acid at Mutated site 5 is Tyr.

[0623] In another preferred embodiment, the mutated PPO comprises a sequence of SEQ ID NO: 1, 2, 3, 4, 5, 6, 7, 8, 9, 10, 11, 12, 13, 14, 15, 16, 17, 18, 19, 20, 21, 22, 23, 24, 25, 26, 27, 28, 29, 30, 31, 32, 33, 34, 35, 36, 37, 38, 39, 40, 41, 42, 43, 44, 45, 46, 47, 48, 49, 50, 51, 52, 53, 54, 55, 56, 57, 58, 59, 60, 61, 62, 63, 64, 65, 66, 67, 68, 69, 70, 71, 72, 73, 74, 75, 76, 77, 78, 79, 80, 81, 82, 83, 84, 85, 86, 87, 88, 89, 90, 91, 92, 93, 94, 95, 96, 97, 98, 99, 100, 101, 102, 103, 104, 105, 106, 107, 108, 109, 110, 111, 112, 113, 114, 115, 116, 117, 118, 119, 120, 121, 122, 123, 124, 125, 126, 127, 128, 129, 130, 131, 132, 133, 134, 135, 136, 137, 138, 139, 140, 141, 142, 143, 144, 145, 146, 147, 148, 149, 150, 151, 152, 153, 154, 155, 156, 157, 158, 159, 160, 161, 162, 163, 164, 165, 166, 167, 168, 169, 170, 171, 172, 173, 174, 175, 176, 177, 178, 179, 180, 181, 182, 183, 184, 185, 186, 187, 188, 189, 190, 191, 192, 193, 194, 195, 196, 197, 198, 199, 200, 201, 202, 203, 204, 205, 206, 207, 208, 209, 210, 211, 212, 213, 214, 215, 216, 217, 218, 219, 220, 221, 222, 223, 224, 225, 226, 227, 228, 229, 230, 231, 232, 233, 234, 235, 236, 237, 238, 239, 240, 241, 242, 243, 244, 245, 246, 247, 248, 249, 250, 251, 252, 253, 254, 255, 256, 257, 258, 259, 260, 261, 262, 263, 264, 265, 266, 267, 268, 269, 270, 271, 272, 273, 274, 275, 276, 277, 278, 279, 280, 281, 282, 283, 284, 285, 286, 287, 288, 289, 290, 291, 292, 293, 294, 295, 296, 297, 298, 299, 300, 301, 312, or 313, a variant, derivative, orthologue, paralogue or homologue thereof, in which:

[0624] the amino acid at Mutated site 4 is Val, and the amino acid at Mutated site 5 is Trp.

[0625] In another preferred embodiment, the mutated PPO comprises a sequence of SEQ ID NO: 1, 2, 3, 4, 5, 6, 7, 8, 9, 10, 11, 12, 13, 14, 15, 16, 17, 18, 19, 20, 21, 22, 23, 24, 25, 26, 27, 28, 29, 30, 31, 32, 33, 34, 35, 36, 37, 38, 39, 40, 41, 42, 43, 44, 45, 46, 47, 48, 49, 50, 51, 52, 53, 54, 55, 56, 57, 58, 59, 60, 61, 62, 63, 64, 65, 66, 67, 68, 69, 70, 71, 72, 73, 74, 75, 76, 77, 78, 79, 80, 81, 82, 83, 84, 85, 86, 87, 88, 89, 90, 91, 92, 93, 94, 95, 96, 97, 98, 99, 100, 101, 102, 103, 104, 105, 106, 107, 108, 109, 110, 111, 112, 113, 114, 115, 116, 117, 118, 119, 120, 121, 122, 123, 124, 125, 126, 127, 128, 129, 130, 131, 132, 133, 134, 135, 136, 137, 138, 139, 140, 141, 142, 143, 144, 145, 146, 147, 148, 149, 150, 151, 152, 153, 154, 155, 156, 157, 158, 159, 160, 161, 162, 163, 164, 165, 166, 167, 168, 169, 170, 171, 172, 173, 174, 175, 176, 177, 178, 179, 180, 181, 182, 183, 184, 185, 186, 187, 188, 189, 190, 191, 192, 193, 194, 195, 196, 197, 198, 199, 200, 201, 202, 203, 204, 205, 206, 207, 208, 209, 210, 211, 212, 213, 214, 215, 216, 217, 218, 219, 220, 221, 222, 223, 224, 225, 226, 227, 228, 229, 230, 231, 232, 233, 234, 235, 236, 237, 238, 239, 240, 241, 242, 243, 244, 245, 246, 247, 248, 249, 250, 251, 252, 253, 254, 255, 256, 257, 258, 259, 260, 261, 262, 263, 264, 265, 266, 267, 268, 269, 270, 271, 272, 273, 274, 275, 276, 277, 278, 279, 280, 281, 282, 283, 284, 285, 286, 287, 288, 289, 290, 291, 292, 293, 294, 295, 296, 297, 298, 299, 300, 301, 312, or 313, a variant, derivative, orthologue, paralogue or homologue thereof, in which:

[0626] the amino acid at Mutated site 4 is Ile, and the amino acid at Mutated site 5 is Ala.

[0627] In another preferred embodiment, the mutated PPO comprises a sequence of SEQ ID NO: 1, 2, 3, 4, 5, 6, 7, 8, 9, 10, 11, 12, 13, 14, 15, 16, 17, 18, 19, 20, 21, 22, 23, 24, 25, 26, 27, 28, 29, 30, 31, 32, 33, 34, 35, 36, 37, 38, 39, 40, 41, 42, 43, 44, 45, 46, 47, 48, 49, 50, 51, 52, 53, 54, 55, 56, 57, 58, 59, 60, 61, 62, 63, 64, 65, 66, 67, 68, 69, 70, 71, 72, 73, 74, 75, 76, 77, 78, 79, 80, 81, 82, 83, 84, 85, 86, 87, 88, 89, 90, 91, 92, 93, 94, 95, 96, 97, 98, 99, 100, 101, 102, 103, 104, 105, 106, 107, 108, 109, 110, 111, 112, 113, 114, 115, 116, 117, 118, 119, 120, 121, 122, 123, 124, 125, 126, 127, 128, 129, 130, 131, 132, 133, 134, 135, 136, 137, 138, 139, 140, 141, 142, 143, 144, 145, 146, 147, 148, 149, 150, 151, 152, 153, 154, 155, 156, 157, 158, 159, 160, 161, 162, 163, 164, 165, 166, 167, 168, 169, 170, 171, 172, 173, 174, 175, 176, 177, 178, 179, 180, 181, 182, 183, 184, 185, 186, 187, 188, 189, 190, 191, 192, 193, 194, 195, 196, 197, 198, 199, 200, 201, 202, 203, 204, 205, 206, 207, 208, 209, 210, 211, 212, 213, 214, 215, 216, 217, 218, 219, 220, 221, 222, 223, 224, 225, 226, 227, 228, 229, 230, 231, 232, 233, 234, 235, 236, 237, 238, 239, 240, 241, 242, 243, 244, 245, 246, 247, 248, 249, 250, 251, 252, 253, 254, 255, 256, 257, 258, 259, 260, 261, 262, 263, 264, 265, 266, 267, 268, 269, 270, 271, 272, 273, 274, 275, 276, 277, 278, 279, 280, 281, 282, 283, 284, 285, 286, 287, 288, 289, 290, 291, 292, 293, 294, 295, 296, 297, 298, 299, 300, 301, 312, or 313, a variant, derivative, orthologue, paralogue or homologue thereof, in which:

[0628] the amino acid at Mutated site 4 is Ile, and the amino acid at Mutated site 5 is Leu.

[0629] In another preferred embodiment, the mutated PPO comprises a sequence of SEQ ID NO: 1, 2, 3, 4, 5, 6, 7, 8, 9, 10, 11, 12, 13, 14, 15, 16, 17, 18, 19, 20, 21, 22, 23, 24, 25, 26, 27, 28, 29, 30, 31, 32, 33, 34, 35, 36, 37, 38, 39, 40, 41, 42, 43, 44, 45, 46, 47, 48, 49, 50, 51, 52, 53, 54, 55, 56, 57, 58, 59, 60, 61, 62, 63, 64, 65, 66, 67, 68, 69, 70, 71, 72, 73, 74, 75, 76, 77, 78, 79, 80, 81, 82, 83, 84, 85, 86, 87, 88, 89, 90, 91, 92, 93, 94, 95, 96, 97, 98, 99, 100, 101, 102, 103, 104, 105, 106, 107, 108, 109, 110, 111, 112, 113, 114, 115, 116, 117, 118, 119, 120, 121, 122, 123, 124, 125, 126, 127, 128, 129, 130, 131, 132, 133, 134, 135, 136, 137, 138, 139, 140, 141, 142, 143, 144, 145, 146, 147, 148, 149, 150, 151, 152, 153, 154, 155, 156, 157, 158, 159, 160, 161, 162, 163, 164, 165, 166, 167, 168, 169, 170, 171, 172, 173, 174, 175, 176, 177, 178, 179, 180, 181, 182, 183, 184, 185, 186, 187, 188, 189, 190, 191, 192, 193, 194, 195, 196, 197, 198, 199, 200, 201, 202, 203, 204, 205, 206, 207, 208, 209, 210, 211, 212, 213, 214, 215, 216, 217, 218, 219, 220, 221, 222, 223, 224, 225, 226, 227, 228, 229, 230, 231, 232, 233, 234, 235, 236, 237, 238, 239, 240, 241, 242, 243, 244, 245, 246, 247, 248, 249, 250, 251, 252, 253, 254, 255, 256, 257, 258, 259, 260, 261, 262, 263, 264, 265, 266, 267, 268, 269, 270, 271, 272, 273, 274, 275, 276, 277, 278, 279, 280, 281, 282, 283, 284, 285, 286, 287, 288, 289, 290, 291, 292, 293, 294, 295, 296, 297, 298, 299, 300, 301, 312, or 313, a variant, derivative, orthologue, paralogue or homologue thereof, in which:

[0630] the amino acid at Mutated site 4 is Ile, and the amino acid at Mutated site 5 is Val.

[0631] In another preferred embodiment, the mutated PPO comprises a sequence of SEQ ID NO: 1, 2, 3, 4, 5, 6, 7, 8, 9, 10, 11, 12, 13, 14, 15, 16, 17, 18, 19, 20, 21, 22, 23, 24, 25, 26, 27, 28, 29, 30, 31, 32, 33, 34, 35, 36, 37, 38, 39, 40, 41, 42, 43, 44, 45, 46, 47, 48, 49, 50, 51, 52, 53, 54, 55, 56, 57, 58, 59, 60, 61, 62, 63, 64, 65, 66, 67, 68, 69, 70, 71, 72, 73, 74, 75, 76, 77, 78, 79, 80, 81, 82, 83, 84, 85, 86, 87, 88, 89, 90, 91, 92, 93, 94, 95, 96, 97, 98, 99, 100, 101, 102, 103, 104, 105, 106, 107, 108, 109, 110, 111, 112, 113, 114, 115, 116, 117, 118, 119, 120, 121, 122, 123, 124, 125, 126, 127, 128, 129, 130, 131, 132, 133, 134, 135, 136, 137, 138, 139, 140, 141, 142, 143, 144, 145, 146, 147, 148, 149, 150, 151, 152, 153, 154, 155, 156, 157, 158, 159, 160, 161, 162, 163, 164, 165, 166, 167, 168, 169, 170, 171, 172, 173, 174, 175, 176, 177, 178, 179, 180, 181, 182, 183, 184, 185, 186, 187, 188, 189, 190, 191, 192, 193, 194, 195, 196, 197, 198, 199, 200, 201, 202, 203, 204, 205, 206, 207, 208, 209, 210, 211, 212, 213, 214, 215, 216, 217, 218, 219, 220, 221, 222, 223, 224, 225, 226, 227, 228, 229, 230, 231, 232, 233, 234, 235, 236, 237, 238, 239, 240, 241, 242, 243, 244, 245, 246, 247, 248, 249, 250, 251, 252, 253, 254, 255, 256, 257, 258, 259, 260, 261, 262, 263, 264, 265, 266, 267, 268, 269, 270, 271, 272, 273, 274, 275, 276, 277, 278, 279, 280, 281, 282, 283, 284, 285, 286, 287, 288, 289, 290, 291, 292, 293, 294, 295, 296, 297, 298, 299, 300, 301, 312, or 313, a variant, derivative, orthologue, paralogue or homologue thereof, in which:

[0632] the amino acid at Mutated site 4 is Ile, and the amino acid at Mutated site 5 is Ile.

[0633] In another preferred embodiment, the mutated PPO comprises a sequence of SEQ ID NO: 1, 2, 3, 4, 5, 6, 7, 8, 9, 10, 11, 12, 13, 14, 15, 16, 17, 18, 19, 20, 21, 22, 23, 24, 25, 26, 27, 28, 29, 30, 31, 32, 33, 34, 35, 36, 37, 38, 39, 40, 41, 42, 43, 44, 45, 46, 47, 48, 49, 50, 51, 52, 53, 54, 55, 56, 57, 58, 59, 60, 61, 62, 63, 64, 65, 66, 67, 68, 69, 70, 71, 72, 73, 74, 75, 76, 77, 78, 79, 80, 81, 82, 83, 84, 85, 86, 87, 88, 89, 90, 91, 92, 93, 94, 95, 96, 97, 98, 99, 100, 101, 102, 103, 104, 105, 106, 107, 108, 109, 110, 111, 112, 113, 114, 115, 116, 117, 118, 119, 120, 121, 122, 123, 124, 125, 126, 127, 128, 129, 130, 131, 132, 133, 134, 135, 136, 137, 138, 139, 140, 141, 142, 143, 144, 145, 146, 147, 148, 149, 150, 151, 152, 153, 154, 155, 156, 157, 158, 159, 160, 161, 162, 163, 164, 165, 166, 167, 168, 169, 170, 171, 172, 173, 174, 175, 176, 177, 178, 179, 180, 181, 182, 183, 184, 185, 186, 187, 188, 189, 190, 191, 192, 193, 194, 195, 196, 197, 198, 199, 200, 201, 202, 203, 204, 205, 206, 207, 208, 209, 210, 211, 212, 213, 214, 215, 216, 217, 218, 219, 220, 221, 222, 223, 224, 225, 226, 227, 228, 229, 230, 231, 232, 233, 234, 235, 236, 237, 238, 239, 240, 241, 242, 243, 244, 245, 246, 247, 248, 249, 250, 251, 252, 253, 254, 255, 256, 257, 258, 259, 260, 261, 262, 263, 264, 265, 266, 267, 268, 269, 270, 271, 272, 273, 274, 275, 276, 277, 278, 279, 280, 281, 282, 283, 284, 285, 286, 287, 288, 289, 290, 291, 292, 293, 294, 295, 296, 297, 298, 299, 300, 301, 312, or 313, a variant, derivative, orthologue, paralogue or homologue thereof, in which:

[0634] the amino acid at Mutated site 4 is Ile, and the amino acid at Mutated site 5 is Met.

[0635] In another preferred embodiment, the mutated PPO comprises a sequence of SEQ ID NO: 1, 2, 3, 4, 5, 6, 7, 8, 9, 10, 11, 12, 13, 14, 15, 16, 17, 18, 19, 20, 21, 22, 23, 24, 25, 26, 27, 28, 29, 30, 31, 32, 33, 34, 35, 36, 37, 38, 39, 40, 41, 42, 43, 44, 45, 46, 47, 48, 49, 50, 51, 52, 53, 54, 55, 56, 57, 58, 59, 60, 61, 62, 63, 64, 65, 66, 67, 68, 69, 70, 71, 72, 73, 74, 75, 76, 77, 78, 79, 80, 81, 82, 83, 84, 85, 86, 87, 88, 89, 90, 91, 92, 93, 94, 95, 96, 97, 98, 99, 100, 101, 102, 103, 104, 105, 106, 107, 108, 109, 110, 111, 112, 113, 114, 115, 116, 117, 118, 119, 120, 121, 122, 123, 124, 125, 126, 127, 128, 129, 130, 131, 132, 133, 134, 135, 136, 137, 138, 139, 140, 141, 142, 143, 144, 145, 146, 147, 148, 149, 150, 151, 152, 153, 154, 155, 156, 157, 158, 159, 160, 161, 162, 163, 164, 165, 166, 167, 168, 169, 170, 171, 172, 173, 174, 175, 176, 177, 178, 179, 180, 181, 182, 183, 184, 185, 186, 187, 188, 189, 190, 191, 192, 193, 194, 195, 196, 197, 198, 199, 200, 201, 202, 203, 204, 205, 206, 207, 208, 209, 210, 211, 212, 213, 214, 215, 216, 217, 218, 219, 220, 221, 222, 223, 224, 225, 226, 227, 228, 229, 230, 231, 232, 233, 234, 235, 236, 237, 238, 239, 240, 241, 242, 243, 244, 245, 246, 247, 248, 249, 250, 251, 252, 253, 254, 255, 256, 257, 258, 259, 260, 261, 262, 263, 264, 265, 266, 267, 268, 269, 270, 271, 272, 273, 274, 275, 276, 277, 278, 279, 280, 281, 282, 283, 284, 285, 286, 287, 288, 289, 290, 291, 292, 293, 294, 295, 296, 297, 298, 299, 300, 301, 312, or 313, a variant, derivative, orthologue, paralogue or homologue thereof, in which:

[0636] the amino acid at Mutated site 4 is Ile, and the amino acid at Mutated site 5 is His.

[0637] In another preferred embodiment, the mutated PPO comprises a sequence of SEQ ID NO: 1, 2, 3, 4, 5, 6, 7, 8, 9, 10, 11, 12, 13, 14, 15, 16, 17, 18, 19, 20, 21, 22, 23, 24, 25, 26, 27, 28, 29, 30, 31, 32, 33, 34, 35, 36, 37, 38, 39, 40, 41, 42, 43, 44, 45, 46, 47, 48, 49, 50, 51, 52, 53, 54, 55, 56, 57, 58, 59, 60, 61, 62, 63, 64, 65, 66, 67, 68, 69, 70, 71, 72, 73, 74, 75, 76, 77, 78, 79, 80, 81, 82, 83, 84, 85, 86, 87, 88, 89, 90, 91, 92, 93, 94, 95, 96, 97, 98, 99, 100, 101, 102, 103, 104, 105, 106, 107, 108, 109, 110, 111, 112, 113, 114, 115, 116, 117, 118, 119, 120, 121, 122, 123, 124, 125, 126, 127, 128, 129, 130, 131, 132, 133, 134, 135, 136, 137, 138, 139, 140, 141, 142, 143, 144, 145, 146, 147, 148, 149, 150, 151, 152, 153, 154, 155, 156, 157, 158, 159, 160, 161, 162, 163, 164, 165, 166, 167, 168, 169, 170, 171, 172, 173, 174, 175, 176, 177, 178, 179, 180, 181, 182, 183, 184, 185, 186, 187, 188, 189, 190, 191, 192, 193, 194, 195, 196, 197, 198, 199, 200, 201, 202, 203, 204, 205, 206, 207, 208, 209, 210, 211, 212, 213, 214, 215, 216, 217, 218, 219, 220, 221, 222, 223, 224, 225, 226, 227, 228, 229, 230, 231, 232, 233, 234, 235, 236, 237, 238, 239, 240, 241, 242, 243, 244, 245, 246, 247, 248, 249, 250, 251, 252, 253, 254, 255, 256, 257, 258, 259, 260, 261, 262, 263, 264, 265, 266, 267, 268, 269, 270, 271, 272, 273, 274, 275, 276, 277, 278, 279, 280, 281, 282, 283, 284, 285, 286, 287, 288, 289, 290, 291, 292, 293, 294, 295, 296, 297, 298, 299, 300, 301, 312, or 313, a variant, derivative, orthologue, paralogue or homologue thereof, in which:

[0638] the amino acid at Mutated site 4 is Ile, and the amino acid at Mutated site 5 is Lys.

[0639] In another preferred embodiment, the mutated PPO comprises a sequence of SEQ ID NO: 1, 2, 3, 4, 5, 6, 7, 8, 9, 10, 11, 12, 13, 14, 15, 16, 17, 18, 19, 20, 21, 22, 23, 24, 25, 26, 27, 28, 29, 30, 31, 32, 33, 34, 35, 36, 37, 38, 39, 40, 41, 42, 43, 44, 45, 46, 47, 48, 49, 50, 51, 52, 53, 54, 55, 56, 57, 58, 59, 60, 61, 62, 63, 64, 65, 66, 67, 68, 69, 70, 71, 72, 73, 74, 75, 76, 77, 78, 79, 80, 81, 82, 83, 84, 85, 86, 87, 88, 89, 90, 91, 92, 93, 94, 95, 96, 97, 98, 99, 100, 101, 102, 103, 104, 105, 106, 107, 108, 109, 110, 111, 112, 113, 114, 115, 116, 117, 118, 119, 120, 121, 122, 123, 124, 125, 126, 127, 128, 129, 130, 131, 132, 133, 134, 135, 136, 137, 138, 139, 140, 141, 142, 143, 144, 145, 146, 147, 148, 149, 150, 151, 152, 153, 154, 155, 156, 157, 158, 159, 160, 161, 162, 163, 164, 165, 166, 167, 168, 169, 170, 171, 172, 173, 174, 175, 176, 177, 178, 179, 180, 181, 182, 183, 184, 185, 186, 187, 188, 189, 190, 191, 192, 193, 194, 195, 196, 197, 198, 199, 200, 201, 202, 203, 204, 205, 206, 207, 208, 209, 210, 211, 212, 213, 214, 215, 216, 217, 218, 219, 220, 221, 222, 223, 224, 225, 226, 227, 228, 229, 230, 231, 232, 233, 234, 235, 236, 237, 238, 239, 240, 241, 242, 243, 244, 245, 246, 247, 248, 249, 250, 251, 252, 253, 254, 255, 256, 257, 258, 259, 260, 261, 262, 263, 264, 265, 266, 267, 268, 269, 270, 271, 272, 273, 274, 275, 276, 277, 278, 279, 280, 281, 282, 283, 284, 285, 286, 287, 288, 289, 290, 291, 292, 293, 294, 295, 296, 297, 298, 299, 300, 301, 312, or 313, a variant, derivative, orthologue, paralogue or homologue thereof, in which:

[0640] the amino acid at Mutated site 4 is Ile, and the amino acid at Mutated site 5 is Asp.

[0641] In another preferred embodiment, the mutated PPO comprises a sequence of SEQ ID NO: 1, 2, 3, 4, 5, 6, 7, 8, 9, 10, 11, 12, 13, 14, 15, 16, 17, 18, 19, 20, 21, 22, 23, 24, 25, 26, 27, 28, 29, 30, 31, 32, 33, 34, 35, 36, 37, 38, 39, 40, 41, 42, 43, 44, 45, 46, 47, 48, 49, 50, 51, 52, 53, 54, 55, 56, 57, 58, 59, 60, 61, 62, 63, 64, 65, 66, 67, 68, 69, 70, 71, 72, 73, 74, 75, 76, 77, 78, 79, 80, 81, 82, 83, 84, 85, 86, 87, 88, 89, 90, 91, 92, 93, 94, 95, 96, 97, 98, 99, 100, 101, 102, 103, 104, 105, 106, 107, 108, 109, 110, 111, 112, 113, 114, 115, 116, 117, 118, 119, 120, 121, 122, 123, 124, 125, 126, 127, 128, 129, 130, 131, 132, 133, 134, 135, 136, 137, 138, 139, 140, 141, 142, 143, 144, 145, 146, 147, 148, 149, 150, 151, 152, 153, 154, 155, 156, 157, 158, 159, 160, 161, 162, 163, 164, 165, 166, 167, 168, 169, 170, 171, 172, 173, 174, 175, 176, 177, 178, 179, 180, 181, 182, 183, 184, 185, 186, 187, 188, 189, 190, 191, 192, 193, 194, 195, 196, 197, 198, 199, 200, 201, 202, 203, 204, 205, 206, 207, 208, 209, 210, 211, 212, 213, 214, 215, 216, 217, 218, 219, 220, 221, 222, 223, 224, 225, 226, 227, 228, 229, 230, 231, 232, 233, 234, 235, 236, 237, 238, 239, 240, 241, 242, 243, 244, 245, 246, 247, 248, 249, 250, 251, 252, 253, 254, 255, 256, 257, 258, 259, 260, 261, 262, 263, 264, 265, 266, 267, 268, 269, 270, 271, 272, 273, 274, 275, 276, 277, 278, 279, 280, 281, 282, 283, 284, 285, 286, 287, 288, 289, 290, 291, 292, 293, 294, 295, 296, 297, 298, 299, 300, 301, 312, or 313, a variant, derivative, orthologue, paralogue or homologue thereof, in which:

[0642] the amino acid at Mutated site 4 is Ile, and the amino acid at Mutated site 5 is Glu.

[0643] In another preferred embodiment, the mutated PPO comprises a sequence of SEQ ID NO: 1, 2, 3, 4, 5, 6, 7, 8, 9, 10, 11, 12, 13, 14, 15, 16, 17, 18, 19, 20, 21, 22, 23, 24, 25, 26, 27, 28, 29, 30, 31, 32, 33, 34, 35, 36, 37, 38, 39, 40, 41, 42, 43, 44, 45, 46, 47, 48, 49, 50, 51, 52, 53, 54, 55, 56, 57, 58, 59, 60, 61, 62, 63, 64, 65, 66, 67, 68, 69, 70, 71, 72, 73, 74, 75, 76, 77, 78, 79, 80, 81, 82, 83, 84, 85, 86, 87, 88, 89, 90, 91, 92, 93, 94, 95, 96, 97, 98, 99, 100, 101, 102, 103, 104, 105, 106, 107, 108, 109, 110, 111, 112, 113, 114, 115, 116, 117, 118, 119, 120, 121, 122, 123, 124, 125, 126, 127, 128, 129, 130, 131, 132, 133, 134, 135, 136, 137, 138, 139, 140, 141, 142, 143, 144, 145, 146, 147, 148, 149, 150, 151, 152, 153, 154, 155, 156, 157, 158, 159, 160, 161, 162, 163, 164, 165, 166, 167, 168, 169, 170, 171, 172, 173, 174, 175, 176, 177, 178, 179, 180, 181, 182, 183, 184, 185, 186, 187, 188, 189, 190, 191, 192, 193, 194, 195, 196, 197, 198, 199, 200, 201, 202, 203, 204, 205, 206, 207, 208, 209, 210, 211, 212, 213, 214, 215, 216, 217, 218, 219, 220, 221, 222, 223, 224, 225, 226, 227, 228, 229, 230, 231, 232, 233, 234, 235, 236, 237, 238, 239, 240, 241, 242, 243, 244, 245, 246, 247, 248, 249, 250, 251, 252, 253, 254, 255, 256, 257, 258, 259, 260, 261, 262, 263, 264, 265, 266, 267, 268, 269, 270, 271, 272, 273, 274, 275, 276, 277, 278, 279, 280, 281, 282, 283, 284, 285, 286, 287, 288, 289, 290, 291, 292, 293, 294, 295, 296, 297, 298, 299, 300, 301, 312, or 313, a variant, derivative, orthologue, paralogue or homologue thereof, in which:

[0644] the amino acid at Mutated site 4 is Ile, and the amino acid at Mutated site 5 is Ser.

[0645] In another preferred embodiment, the mutated PPO comprises a sequence of SEQ ID NO: 1, 2, 3, 4, 5, 6, 7, 8, 9, 10, 11, 12, 13, 14, 15, 16, 17, 18, 19, 20, 21, 22, 23, 24, 25, 26, 27, 28, 29, 30, 31, 32, 33, 34, 35, 36, 37, 38, 39, 40, 41, 42, 43, 44, 45, 46, 47, 48, 49, 50, 51, 52, 53, 54, 55, 56, 57, 58, 59, 60, 61, 62, 63, 64, 65, 66, 67, 68, 69, 70, 71, 72, 73, 74, 75, 76, 77, 78, 79, 80, 81, 82, 83, 84, 85, 86, 87, 88, 89, 90, 91, 92, 93, 94, 95, 96, 97, 98, 99, 100, 101, 102, 103, 104, 105, 106, 107, 108, 109, 110, 111, 112, 113, 114, 115, 116, 117, 118, 119, 120, 121, 122, 123, 124, 125, 126, 127, 128, 129, 130, 131, 132, 133, 134, 135, 136, 137, 138, 139, 140, 141, 142, 143, 144, 145, 146, 147, 148, 149, 150, 151, 152, 153, 154, 155, 156, 157, 158, 159, 160, 161, 162, 163, 164, 165, 166, 167, 168, 169, 170, 171, 172, 173, 174, 175, 176, 177, 178, 179, 180, 181, 182, 183, 184, 185, 186, 187, 188, 189, 190, 191, 192, 193, 194, 195, 196, 197, 198, 199, 200, 201, 202, 203, 204, 205, 206, 207, 208, 209, 210, 211, 212, 213, 214, 215, 216, 217, 218, 219, 220, 221, 222, 223, 224, 225, 226, 227, 228, 229, 230, 231, 232, 233, 234, 235, 236, 237, 238, 239, 240, 241, 242, 243, 244, 245, 246, 247, 248, 249, 250, 251, 252, 253, 254, 255, 256, 257, 258, 259, 260, 261, 262, 263, 264, 265, 266, 267, 268, 269, 270, 271, 272, 273, 274, 275, 276, 277, 278, 279, 280, 281, 282, 283, 284, 285, 286, 287, 288, 289, 290, 291, 292, 293, 294, 295, 296, 297, 298, 299, 300, 301, 312, or 313, a variant, derivative, orthologue, paralogue or homologue thereof, in which:

[0646] the amino acid at Mutated site 4 is Ile, and the amino acid at Mutated site 5 is Thr.

[0647] In another preferred embodiment, the mutated PPO comprises a sequence of SEQ ID NO: 1, 2, 3, 4, 5, 6, 7, 8, 9, 10, 11, 12, 13, 14, 15, 16, 17, 18, 19, 20, 21, 22, 23, 24, 25, 26, 27, 28, 29, 30, 31, 32, 33, 34, 35, 36, 37, 38, 39, 40, 41, 42, 43, 44, 45, 46, 47, 48, 49, 50, 51, 52, 53, 54, 55, 56, 57, 58, 59, 60, 61, 62, 63, 64, 65, 66, 67, 68, 69, 70, 71, 72, 73, 74, 75, 76, 77, 78, 79, 80, 81, 82, 83, 84, 85, 86, 87, 88, 89, 90, 91, 92, 93, 94, 95, 96, 97, 98, 99, 100, 101, 102, 103, 104, 105, 106, 107, 108, 109, 110, 111, 112, 113, 114, 115, 116, 117, 118, 119, 120, 121, 122, 123, 124, 125, 126, 127, 128, 129, 130, 131, 132, 133, 134, 135, 136, 137, 138, 139, 140, 141, 142, 143, 144, 145, 146, 147, 148, 149, 150, 151, 152, 153, 154, 155, 156, 157, 158, 159, 160, 161, 162, 163, 164, 165, 166, 167, 168, 169, 170, 171, 172, 173, 174, 175, 176, 177, 178, 179, 180, 181, 182, 183, 184, 185, 186, 187, 188, 189, 190, 191, 192, 193, 194, 195, 196, 197, 198, 199, 200, 201, 202, 203, 204, 205, 206, 207, 208, 209, 210, 211, 212, 213, 214, 215, 216, 217, 218, 219, 220, 221, 222, 223, 224, 225, 226, 227, 228, 229, 230, 231, 232, 233, 234, 235, 236, 237, 238, 239, 240, 241, 242, 243, 244, 245, 246, 247, 248, 249, 250, 251, 252, 253, 254, 255, 256, 257, 258, 259, 260, 261, 262, 263, 264, 265, 266, 267, 268, 269, 270, 271, 272, 273, 274, 275, 276, 277, 278, 279, 280, 281, 282, 283, 284, 285, 286, 287, 288, 289, 290, 291, 292, 293, 294, 295, 296, 297, 298, 299, 300, 301, 312, or 313, a variant, derivative, orthologue, paralogue or homologue thereof, in which:

[0648] the amino acid at Mutated site 4 is Ile, and the amino acid at Mutated site 5 is Asn.

[0649] In another preferred embodiment, the mutated PPO comprises a sequence of SEQ ID NO: 1, 2, 3, 4, 5, 6, 7, 8, 9, 10, 11, 12, 13, 14, 15, 16, 17, 18, 19, 20, 21, 22, 23, 24, 25, 26, 27, 28, 29, 30, 31, 32, 33, 34, 35, 36, 37, 38, 39, 40, 41, 42, 43, 44, 45, 46, 47, 48, 49, 50, 51, 52, 53, 54, 55, 56, 57, 58, 59, 60, 61, 62, 63, 64, 65, 66, 67, 68, 69, 70, 71, 72, 73, 74, 75, 76, 77, 78, 79, 80, 81, 82, 83, 84, 85, 86, 87, 88, 89, 90, 91, 92, 93, 94, 95, 96, 97, 98, 99, 100, 101, 102, 103, 104, 105, 106, 107, 108, 109, 110, 111, 112, 113, 114, 115, 116, 117, 118, 119, 120, 121, 122, 123, 124, 125, 126, 127, 128, 129, 130, 131, 132, 133, 134, 135, 136, 137, 138, 139, 140, 141, 142, 143, 144, 145, 146, 147, 148, 149, 150, 151, 152, 153, 154, 155, 156, 157, 158, 159, 160, 161, 162, 163, 164, 165, 166, 167, 168, 169, 170, 171, 172, 173, 174, 175, 176, 177, 178, 179, 180, 181, 182, 183, 184, 185, 186, 187, 188, 189, 190, 191, 192, 193, 194, 195, 196, 197, 198, 199, 200, 201, 202, 203, 204, 205, 206, 207, 208, 209, 210, 211, 212, 213, 214, 215, 216, 217, 218, 219, 220, 221, 222, 223, 224, 225, 226, 227, 228, 229, 230, 231, 232, 233, 234, 235, 236, 237, 238, 239, 240, 241, 242, 243, 244, 245, 246, 247, 248, 249, 250, 251, 252, 253, 254, 255, 256, 257, 258, 259, 260, 261, 262, 263, 264, 265, 266, 267, 268, 269, 270, 271, 272, 273, 274, 275, 276, 277, 278, 279, 280, 281, 282, 283, 284, 285, 286, 287, 288, 289, 290, 291, 292, 293, 294, 295, 296, 297, 298, 299, 300, 301, 312, or 313, a variant, derivative, orthologue, paralogue or homologue thereof, in which:

[0650] the amino acid at Mutated site 4 is Ile, and the amino acid at Mutated site 5 is Gln.

[0651] In another preferred embodiment, the mutated PPO comprises a sequence of SEQ ID NO: 1, 2, 3, 4, 5, 6, 7, 8, 9, 10, 11, 12, 13, 14, 15, 16, 17, 18, 19, 20, 21, 22, 23, 24, 25, 26, 27, 28, 29, 30, 31, 32, 33, 34, 35, 36, 37, 38, 39, 40, 41, 42, 43, 44, 45, 46, 47, 48, 49, 50, 51, 52, 53, 54, 55, 56, 57, 58, 59, 60, 61, 62, 63, 64, 65, 66, 67, 68, 69, 70, 71, 72, 73, 74, 75, 76, 77, 78, 79, 80, 81, 82, 83, 84, 85, 86, 87, 88, 89, 90, 91, 92, 93, 94, 95, 96, 97, 98, 99, 100, 101, 102, 103, 104, 105, 106, 107, 108, 109, 110, 111, 112, 113, 114, 115, 116, 117, 118, 119, 120, 121, 122, 123, 124, 125, 126, 127, 128, 129, 130, 131, 132, 133, 134, 135, 136, 137, 138, 139, 140, 141, 142, 143, 144, 145, 146, 147, 148, 149, 150, 151, 152, 153, 154, 155, 156, 157, 158, 159, 160, 161, 162, 163, 164, 165, 166, 167, 168, 169, 170, 171, 172, 173, 174, 175, 176, 177, 178, 179, 180, 181, 182, 183, 184, 185, 186, 187, 188, 189, 190, 191, 192, 193, 194, 195, 196, 197, 198, 199, 200, 201, 202, 203, 204, 205, 206, 207, 208, 209, 210, 211, 212, 213, 214, 215, 216, 217, 218, 219, 220, 221, 222, 223, 224, 225, 226, 227, 228, 229, 230, 231, 232, 233, 234, 235, 236, 237, 238, 239, 240, 241, 242, 243, 244, 245, 246, 247, 248, 249, 250, 251, 252, 253, 254, 255, 256, 257, 258, 259, 260, 261, 262, 263, 264, 265, 266, 267, 268, 269, 270, 271, 272, 273, 274, 275, 276, 277, 278, 279, 280, 281, 282, 283, 284, 285, 286, 287, 288, 289, 290, 291, 292, 293, 294, 295, 296, 297, 298, 299, 300, 301, 312, or 313, a variant, derivative, orthologue, paralogue or homologue thereof, in which:

[0652] the amino acid at Mutated site 4 is Ile, and the amino acid at Mutated site 5 is Cys.

[0653] In another preferred embodiment, the mutated PPO comprises a sequence of SEQ ID NO: 1, 2, 3, 4, 5, 6, 7, 8, 9, 10, 11, 12, 13, 14, 15, 16, 17, 18, 19, 20, 21, 22, 23, 24, 25, 26, 27, 28, 29, 30, 31, 32, 33, 34, 35, 36, 37, 38, 39, 40, 41, 42, 43, 44, 45, 46, 47, 48, 49, 50, 51, 52, 53, 54, 55, 56, 57, 58, 59, 60, 61, 62, 63, 64, 65, 66, 67, 68, 69, 70, 71, 72, 73, 74, 75, 76, 77, 78, 79, 80, 81, 82, 83, 84, 85, 86, 87, 88, 89, 90, 91, 92, 93, 94, 95, 96, 97, 98, 99, 100, 101, 102, 103, 104, 105, 106, 107, 108, 109, 110, 111, 112, 113, 114, 115, 116, 117, 118, 119, 120, 121, 122, 123, 124, 125, 126, 127, 128, 129, 130, 131, 132, 133, 134, 135, 136, 137, 138, 139, 140, 141, 142, 143, 144, 145, 146, 147, 148, 149, 150, 151, 152, 153, 154, 155, 156, 157, 158, 159, 160, 161, 162, 163, 164, 165, 166, 167, 168, 169, 170, 171, 172, 173, 174, 175, 176, 177, 178, 179, 180, 181, 182, 183, 184, 185, 186, 187, 188, 189, 190, 191, 192, 193, 194, 195, 196, 197, 198, 199, 200, 201, 202, 203, 204, 205, 206, 207, 208, 209, 210, 211, 212, 213, 214, 215, 216, 217, 218, 219, 220, 221, 222, 223, 224, 225, 226, 227, 228, 229, 230, 231, 232, 233, 234, 235, 236, 237, 238, 239, 240, 241, 242, 243, 244, 245, 246, 247, 248, 249, 250, 251, 252, 253, 254, 255, 256, 257, 258, 259, 260, 261, 262, 263, 264, 265, 266, 267, 268, 269, 270, 271, 272, 273, 274, 275, 276, 277, 278, 279, 280, 281, 282, 283, 284, 285, 286, 287, 288, 289, 290, 291, 292, 293, 294, 295, 296, 297, 298, 299, 300, 301, 312, or 313, a variant, derivative, orthologue, paralogue or homologue thereof, in which:

[0654] the amino acid at Mutated site 4 is Ile, and the amino acid at Mutated site 5 is Gly.

[0655] In another preferred embodiment, the mutated PPO comprises a sequence of SEQ ID NO: 1, 2, 3, 4, 5, 6, 7, 8, 9, 10, 11, 12, 13, 14, 15, 16, 17, 18, 19, 20, 21, 22, 23, 24, 25, 26, 27, 28, 29, 30, 31, 32, 33, 34, 35, 36, 37, 38, 39, 40, 41, 42, 43, 44, 45, 46, 47, 48, 49, 50, 51, 52, 53, 54, 55, 56, 57, 58, 59, 60, 61, 62, 63, 64, 65, 66, 67, 68, 69, 70, 71, 72, 73, 74, 75, 76, 77, 78, 79, 80, 81, 82, 83, 84, 85, 86, 87, 88, 89, 90, 91, 92, 93, 94, 95, 96, 97, 98, 99, 100, 101, 102, 103, 104, 105, 106, 107, 108, 109, 110, 111, 112, 113, 114, 115, 116, 117, 118, 119, 120, 121, 122, 123, 124, 125, 126, 127, 128, 129, 130, 131, 132, 133, 134, 135, 136, 137, 138, 139, 140, 141, 142, 143, 144, 145, 146, 147, 148, 149, 150, 151, 152, 153, 154, 155, 156, 157, 158, 159, 160, 161, 162, 163, 164, 165, 166, 167, 168, 169, 170, 171, 172, 173, 174, 175, 176, 177, 178, 179, 180, 181, 182, 183, 184, 185, 186, 187, 188, 189, 190, 191, 192, 193, 194, 195, 196, 197, 198, 199, 200, 201, 202, 203, 204, 205, 206, 207, 208, 209, 210, 211, 212, 213, 214, 215, 216, 217, 218, 219, 220, 221, 222, 223, 224, 225, 226, 227, 228, 229, 230, 231, 232, 233, 234, 235, 236, 237, 238, 239, 240, 241, 242, 243, 244, 245, 246, 247, 248, 249, 250, 251, 252, 253, 254, 255, 256, 257, 258, 259, 260, 261, 262, 263, 264, 265, 266, 267, 268, 269, 270, 271, 272, 273, 274, 275, 276, 277, 278, 279, 280, 281, 282, 283, 284, 285, 286, 287, 288, 289, 290, 291, 292, 293, 294, 295, 296, 297, 298, 299, 300, 301, 312, or 313, a variant, derivative, orthologue, paralogue or homologue thereof, in which:

[0656] the amino acid at Mutated site 4 is Ile, and the amino acid at Mutated site 5 is Pro.

[0657] In another preferred embodiment, the mutated PPO comprises a sequence of SEQ ID NO: 1, 2, 3, 4, 5, 6, 7, 8, 9, 10, 11, 12, 13, 14, 15, 16, 17, 18, 19, 20, 21, 22, 23, 24, 25, 26, 27, 28, 29, 30, 31, 32, 33, 34, 35, 36, 37, 38, 39, 40, 41, 42, 43, 44, 45, 46, 47, 48, 49, 50, 51, 52, 53, 54, 55, 56, 57, 58, 59, 60, 61, 62, 63, 64, 65, 66, 67, 68, 69, 70, 71, 72, 73, 74, 75, 76, 77, 78, 79, 80, 81, 82, 83, 84, 85, 86, 87, 88, 89, 90, 91, 92, 93, 94, 95, 96, 97, 98, 99, 100, 101, 102, 103, 104, 105, 106, 107, 108, 109, 110, 111, 112, 113, 114, 115, 116, 117, 118, 119, 120, 121, 122, 123, 124, 125, 126, 127, 128, 129, 130, 131, 132, 133, 134, 135, 136, 137, 138, 139, 140, 141, 142, 143, 144, 145, 146, 147, 148, 149, 150, 151, 152, 153, 154, 155, 156, 157, 158, 159, 160, 161, 162, 163, 164, 165, 166, 167, 168, 169, 170, 171, 172, 173, 174, 175, 176, 177, 178, 179, 180, 181, 182, 183, 184, 185, 186, 187, 188, 189, 190, 191, 192, 193, 194, 195, 196, 197, 198, 199, 200, 201, 202, 203, 204, 205, 206, 207, 208, 209, 210, 211, 212, 213, 214, 215, 216, 217, 218, 219, 220, 221, 222, 223, 224, 225, 226, 227, 228, 229, 230, 231, 232, 233, 234, 235, 236, 237, 238, 239, 240, 241, 242, 243, 244, 245, 246, 247, 248, 249, 250, 251, 252, 253, 254, 255, 256, 257, 258, 259, 260, 261, 262, 263, 264, 265, 266, 267, 268, 269, 270, 271, 272, 273, 274, 275, 276, 277, 278, 279, 280, 281, 282, 283, 284, 285, 286, 287, 288, 289, 290, 291, 292, 293, 294, 295, 296, 297, 298, 299, 300, 301, 312, or 313, a variant, derivative, orthologue, paralogue or homologue thereof, in which:

[0658] the amino acid at Mutated site 4 is Ile, and the amino acid at Mutated site 5 is Arg.

[0659] In another preferred embodiment, the mutated PPO comprises a sequence of SEQ ID NO: 1, 2, 3, 4, 5, 6, 7, 8, 9, 10, 11, 12, 13, 14, 15, 16, 17, 18, 19, 20, 21, 22, 23, 24, 25, 26, 27, 28, 29, 30, 31, 32, 33, 34, 35, 36, 37, 38, 39, 40, 41, 42, 43, 44, 45, 46, 47, 48, 49, 50, 51, 52, 53, 54, 55, 56, 57, 58, 59, 60, 61, 62, 63, 64, 65, 66, 67, 68, 69, 70, 71, 72, 73, 74, 75, 76, 77, 78, 79, 80, 81, 82, 83, 84, 85, 86, 87, 88, 89, 90, 91, 92, 93, 94, 95, 96, 97, 98, 99, 100, 101, 102, 103, 104, 105, 106, 107, 108, 109, 110, 111, 112, 113, 114, 115, 116, 117, 118, 119, 120, 121, 122, 123, 124, 125, 126, 127, 128, 129, 130, 131, 132, 133, 134, 135, 136, 137, 138, 139, 140, 141, 142, 143, 144, 145, 146, 147, 148, 149, 150, 151, 152, 153, 154, 155, 156, 157, 158, 159, 160, 161, 162, 163, 164, 165, 166, 167, 168, 169, 170, 171, 172, 173, 174, 175, 176, 177, 178, 179, 180, 181, 182, 183, 184, 185, 186, 187, 188, 189, 190, 191, 192, 193, 194, 195, 196, 197, 198, 199, 200, 201, 202, 203, 204, 205, 206, 207, 208, 209, 210, 211, 212, 213, 214, 215, 216, 217, 218, 219, 220, 221, 222, 223, 224, 225, 226, 227, 228, 229, 230, 231, 232, 233, 234, 235, 236, 237, 238, 239, 240, 241, 242, 243, 244, 245, 246, 247, 248, 249, 250, 251, 252, 253, 254, 255, 256, 257, 258, 259, 260, 261, 262, 263, 264, 265, 266, 267, 268, 269, 270, 271, 272, 273, 274, 275, 276, 277, 278, 279, 280, 281, 282, 283, 284, 285, 286, 287, 288, 289, 290, 291, 292, 293, 294, 295, 296, 297, 298, 299, 300, 301, 312, or 313, a variant, derivative, orthologue, paralogue or homologue thereof, in which:

[0660] the amino acid at Mutated site 4 is Ile, and the amino acid at Mutated site 5 is Tyr.

[0661] In another preferred embodiment, the mutated PPO comprises a sequence of SEQ ID NO: 1, 2, 3, 4, 5, 6, 7, 8, 9, 10, 11, 12, 13, 14, 15, 16, 17, 18, 19, 20, 21, 22, 23, 24, 25, 26, 27, 28, 29, 30, 31, 32, 33, 34, 35, 36, 37, 38, 39, 40, 41, 42, 43, 44, 45, 46, 47, 48, 49, 50, 51, 52, 53, 54, 55, 56, 57, 58, 59, 60, 61, 62, 63, 64, 65, 66, 67, 68, 69, 70, 71, 72, 73, 74, 75, 76, 77, 78, 79, 80, 81, 82, 83, 84, 85, 86, 87, 88, 89, 90, 91, 92, 93, 94, 95, 96, 97, 98, 99, 100, 101, 102, 103, 104, 105, 106, 107, 108, 109, 110, 111, 112, 113, 114, 115, 116, 117, 118, 119, 120, 121, 122, 123, 124, 125, 126, 127, 128, 129, 130, 131, 132, 133, 134, 135, 136, 137, 138, 139, 140, 141, 142, 143, 144, 145, 146, 147, 148, 149, 150, 151, 152, 153, 154, 155, 156, 157, 158, 159, 160, 161, 162, 163, 164, 165, 166, 167, 168, 169, 170, 171, 172, 173, 174, 175, 176, 177, 178, 179, 180, 181, 182, 183, 184, 185, 186, 187, 188, 189, 190, 191, 192, 193, 194, 195, 196, 197, 198, 199, 200, 201, 202, 203, 204, 205, 206, 207, 208, 209, 210, 211, 212, 213, 214, 215, 216, 217, 218, 219, 220, 221, 222, 223, 224, 225, 226, 227, 228, 229, 230, 231, 232, 233, 234, 235, 236, 237, 238, 239, 240, 241, 242, 243, 244, 245, 246, 247, 248, 249, 250, 251, 252, 253, 254, 255, 256, 257, 258, 259, 260, 261, 262, 263, 264, 265, 266, 267, 268, 269, 270, 271, 272, 273, 274, 275, 276, 277, 278, 279, 280, 281, 282, 283, 284, 285, 286, 287, 288, 289, 290, 291, 292, 293, 294, 295, 296, 297, 298, 299, 300, 301, 312, or 313, a variant, derivative, orthologue, paralogue or homologue thereof, in which:

[0662] the amino acid at Mutated site 4 is Ile, and the amino acid at Mutated site 5 is Trp.

[0663] In another preferred embodiment, the mutated PPO comprises a sequence of SEQ ID NO: 1, 2, 3, 4, 5, 6, 7, 8, 9, 10, 11, 12, 13, 14, 15, 16, 17, 18, 19, 20, 21, 22, 23, 24, 25, 26, 27, 28, 29, 30, 31, 32, 33, 34, 35, 36, 37, 38, 39, 40, 41, 42, 43, 44, 45, 46, 47, 48, 49, 50, 51, 52, 53, 54, 55, 56, 57, 58, 59, 60, 61, 62, 63, 64, 65, 66, 67, 68, 69, 70, 71, 72, 73, 74, 75, 76, 77, 78, 79, 80, 81, 82, 83, 84, 85, 86, 87, 88, 89, 90, 91, 92, 93, 94, 95, 96, 97, 98, 99, 100, 101, 102, 103, 104, 105, 106, 107, 108, 109, 110, 111, 112, 113, 114, 115, 116, 117, 118, 119, 120, 121, 122, 123, 124, 125, 126, 127, 128, 129, 130, 131, 132, 133, 134, 135, 136, 137, 138, 139, 140, 141, 142, 143, 144, 145, 146, 147, 148, 149, 150, 151, 152, 153, 154, 155, 156, 157, 158, 159, 160, 161, 162, 163, 164, 165, 166, 167, 168, 169, 170, 171, 172, 173, 174, 175, 176, 177, 178, 179, 180, 181, 182, 183, 184, 185, 186, 187, 188, 189, 190, 191, 192, 193, 194, 195, 196, 197, 198, 199, 200, 201, 202, 203, 204, 205, 206, 207, 208, 209, 210, 211, 212, 213, 214, 215, 216, 217, 218, 219, 220, 221, 222, 223, 224, 225, 226, 227, 228, 229, 230, 231, 232, 233, 234, 235, 236, 237, 238, 239, 240, 241, 242, 243, 244, 245, 246, 247, 248, 249, 250, 251, 252, 253, 254, 255, 256, 257, 258, 259, 260, 261, 262, 263, 264, 265, 266, 267, 268, 269, 270, 271, 272, 273, 274, 275, 276, 277, 278, 279, 280, 281, 282, 283, 284, 285, 286, 287, 288, 289, 290, 291, 292, 293, 294, 295, 296, 297, 298, 299, 300, 301, 312, or 313, a variant, derivative, orthologue, paralogue or homologue thereof, in which:

[0664] the amino acid at Mutated site 4 is Met, and the amino acid at Mutated site 5 is Ala.

[0665] In another preferred embodiment, the mutated PPO comprises a sequence of SEQ ID NO: 1, 2, 3, 4, 5, 6, 7, 8, 9, 10, 11, 12, 13, 14, 15, 16, 17, 18, 19, 20, 21, 22, 23, 24, 25, 26, 27, 28, 29, 30, 31, 32, 33, 34, 35, 36, 37, 38, 39, 40, 41, 42, 43, 44, 45, 46, 47, 48, 49, 50, 51, 52, 53, 54, 55, 56, 57, 58, 59, 60, 61, 62, 63, 64, 65, 66, 67, 68, 69, 70, 71, 72, 73, 74, 75, 76, 77, 78, 79, 80, 81, 82, 83, 84, 85, 86, 87, 88, 89, 90, 91, 92, 93, 94, 95, 96, 97, 98, 99, 100, 101, 102, 103, 104, 105, 106, 107, 108, 109, 110, 111, 112, 113, 114, 115, 116, 117, 118, 119, 120, 121, 122, 123, 124, 125, 126, 127, 128, 129, 130, 131, 132, 133, 134, 135, 136, 137, 138, 139, 140, 141, 142, 143, 144, 145, 146, 147, 148, 149, 150, 151, 152, 153, 154, 155, 156, 157, 158, 159, 160, 161, 162, 163, 164, 165, 166, 167, 168, 169, 170, 171, 172, 173, 174, 175, 176, 177, 178, 179, 180, 181, 182, 183, 184, 185, 186, 187, 188, 189, 190, 191, 192, 193, 194, 195, 196, 197, 198, 199, 200, 201, 202, 203, 204, 205, 206, 207, 208, 209, 210, 211, 212, 213, 214, 215, 216, 217, 218, 219, 220, 221, 222, 223, 224, 225, 226, 227, 228, 229, 230, 231, 232, 233, 234, 235, 236, 237, 238, 239, 240, 241, 242, 243, 244, 245, 246, 247, 248, 249, 250, 251, 252, 253, 254, 255, 256, 257, 258, 259, 260, 261, 262, 263, 264, 265, 266, 267, 268, 269, 270, 271, 272, 273, 274, 275, 276, 277, 278, 279, 280, 281, 282, 283, 284, 285, 286, 287, 288, 289, 290, 291, 292, 293, 294, 295, 296, 297, 298, 299, 300, 301, 312, or 313, a variant, derivative, orthologue, paralogue or homologue thereof, in which:

[0666] the amino acid at Mutated site 4 is Met, and the amino acid at Mutated site 5 is Leu.

[0667] In another preferred embodiment, the mutated PPO comprises a sequence of SEQ ID NO: 1, 2, 3, 4, 5, 6, 7, 8, 9, 10, 11, 12, 13, 14, 15, 16, 17, 18, 19, 20, 21, 22, 23, 24, 25, 26, 27, 28, 29, 30, 31, 32, 33, 34, 35, 36, 37, 38, 39, 40, 41, 42, 43, 44, 45, 46, 47, 48, 49, 50, 51, 52, 53, 54, 55, 56, 57, 58, 59, 60, 61, 62, 63, 64, 65, 66, 67, 68, 69, 70, 71, 72, 73, 74, 75, 76, 77, 78, 79, 80, 81, 82, 83, 84, 85, 86, 87, 88, 89, 90, 91, 92, 93, 94, 95, 96, 97, 98, 99, 100, 101, 102, 103, 104, 105, 106, 107, 108, 109, 110, 111, 112, 113, 114, 115, 116, 117, 118, 119, 120, 121, 122, 123, 124, 125, 126, 127, 128, 129, 130, 131, 132, 133, 134, 135, 136, 137, 138, 139, 140, 141, 142, 143, 144, 145, 146, 147, 148, 149, 150, 151, 152, 153, 154, 155, 156, 157, 158, 159, 160, 161, 162, 163, 164, 165, 166, 167, 168, 169, 170, 171, 172, 173, 174, 175, 176, 177, 178, 179, 180, 181, 182, 183, 184, 185, 186, 187, 188, 189, 190, 191, 192, 193, 194, 195, 196, 197, 198, 199, 200, 201, 202, 203, 204, 205, 206, 207, 208, 209, 210, 211, 212, 213, 214, 215, 216, 217, 218, 219, 220, 221, 222, 223, 224, 225, 226, 227, 228, 229, 230, 231, 232, 233, 234, 235, 236, 237, 238, 239, 240, 241, 242, 243, 244, 245, 246, 247, 248, 249, 250, 251, 252, 253, 254, 255, 256, 257, 258, 259, 260, 261, 262, 263, 264, 265, 266, 267, 268, 269, 270, 271, 272, 273, 274, 275, 276, 277, 278, 279, 280, 281, 282, 283, 284, 285, 286, 287, 288, 289, 290, 291, 292, 293, 294, 295, 296, 297, 298, 299, 300, 301, 312, or 313, a variant, derivative, orthologue, paralogue or homologue thereof, in which:

[0668] the amino acid at Mutated site 4 is Met, and the amino acid at Mutated site 5 is Val.

[0669] In another preferred embodiment, the mutated PPO comprises a sequence of SEQ ID NO: 1, 2, 3, 4, 5, 6, 7, 8, 9, 10, 11, 12, 13, 14, 15, 16, 17, 18, 19, 20, 21, 22, 23, 24, 25, 26, 27, 28, 29, 30, 31, 32, 33, 34, 35, 36, 37, 38, 39, 40, 41, 42, 43, 44, 45, 46, 47, 48, 49, 50, 51, 52, 53, 54, 55, 56, 57, 58, 59, 60, 61, 62, 63, 64, 65, 66, 67, 68, 69, 70, 71, 72, 73, 74, 75, 76, 77, 78, 79, 80, 81, 82, 83, 84, 85, 86, 87, 88, 89, 90, 91, 92, 93, 94, 95, 96, 97, 98, 99, 100, 101, 102, 103, 104, 105, 106, 107, 108, 109, 110, 111, 112, 113, 114, 115, 116, 117, 118, 119, 120, 121, 122, 123, 124, 125, 126, 127, 128, 129, 130, 131, 132, 133, 134, 135, 136, 137, 138, 139, 140, 141, 142, 143, 144, 145, 146, 147, 148, 149, 150, 151, 152, 153, 154, 155, 156, 157, 158, 159, 160, 161, 162, 163, 164, 165, 166, 167, 168, 169, 170, 171, 172, 173, 174, 175, 176, 177, 178, 179, 180, 181, 182, 183, 184, 185, 186, 187, 188, 189, 190, 191, 192, 193, 194, 195, 196, 197, 198, 199, 200, 201, 202, 203, 204, 205, 206, 207, 208, 209, 210, 211, 212, 213, 214, 215, 216, 217, 218, 219, 220, 221, 222, 223, 224, 225, 226, 227, 228, 229, 230, 231, 232, 233, 234, 235, 236, 237, 238, 239, 240, 241, 242, 243, 244, 245, 246, 247, 248, 249, 250, 251, 252, 253, 254, 255, 256, 257, 258, 259, 260, 261, 262, 263, 264, 265, 266, 267, 268, 269, 270, 271, 272, 273, 274, 275, 276, 277, 278, 279, 280, 281, 282, 283, 284, 285, 286, 287, 288, 289, 290, 291, 292, 293, 294, 295, 296, 297, 298, 299, 300, 301, 312, or 313, a variant, derivative, orthologue, paralogue or homologue thereof, in which:

[0670] the amino acid at Mutated site 4 is Met, and the amino acid at Mutated site 5 is Ile.

[0671] In another preferred embodiment, the mutated PPO comprises a sequence of SEQ ID NO: 1, 2, 3, 4, 5, 6, 7, 8, 9, 10, 11, 12, 13, 14, 15, 16, 17, 18, 19, 20, 21, 22, 23, 24, 25, 26, 27, 28, 29, 30, 31, 32, 33, 34, 35, 36, 37, 38, 39, 40, 41, 42, 43, 44, 45, 46, 47, 48, 49, 50, 51, 52, 53, 54, 55, 56, 57, 58, 59, 60, 61, 62, 63, 64, 65, 66, 67, 68, 69, 70, 71, 72, 73, 74, 75, 76, 77, 78, 79, 80, 81, 82, 83, 84, 85, 86, 87, 88, 89, 90, 91, 92, 93, 94, 95, 96, 97, 98, 99, 100, 101, 102, 103, 104, 105, 106, 107, 108, 109, 110, 111, 112, 113, 114, 115, 116, 117, 118, 119, 120, 121, 122, 123, 124, 125, 126, 127, 128, 129, 130, 131, 132, 133, 134, 135, 136, 137, 138, 139, 140, 141, 142, 143, 144, 145, 146, 147, 148, 149, 150, 151, 152, 153, 154, 155, 156, 157, 158, 159, 160, 161, 162, 163, 164, 165, 166, 167, 168, 169, 170, 171, 172, 173, 174, 175, 176, 177, 178, 179, 180, 181, 182, 183, 184, 185, 186, 187, 188, 189, 190, 191, 192, 193, 194, 195, 196, 197, 198, 199, 200, 201, 202, 203, 204, 205, 206, 207, 208, 209, 210, 211, 212, 213, 214, 215, 216, 217, 218, 219, 220, 221, 222, 223, 224, 225, 226, 227, 228, 229, 230, 231, 232, 233, 234, 235, 236, 237, 238, 239, 240, 241, 242, 243, 244, 245, 246, 247, 248, 249, 250, 251, 252, 253, 254, 255, 256, 257, 258, 259, 260, 261, 262, 263, 264, 265, 266, 267, 268, 269, 270, 271, 272, 273, 274, 275, 276, 277, 278, 279, 280, 281, 282, 283, 284, 285, 286, 287, 288, 289, 290, 291, 292, 293, 294, 295, 296, 297, 298, 299, 300, 301, 312, or 313, a variant, derivative, orthologue, paralogue or homologue thereof, in which:

[0672] the amino acid at Mutated site 4 is Met, and the amino acid at Mutated site 5 is Met.

[0673] In another preferred embodiment, the mutated PPO comprises a sequence of SEQ ID NO: 1, 2, 3, 4, 5, 6, 7, 8, 9, 10, 11, 12, 13, 14, 15, 16, 17, 18, 19, 20, 21, 22, 23, 24, 25, 26, 27, 28, 29, 30, 31, 32, 33, 34, 35, 36, 37, 38, 39, 40, 41, 42, 43, 44, 45, 46, 47, 48, 49, 50, 51, 52, 53, 54, 55, 56, 57, 58, 59, 60, 61, 62, 63, 64, 65, 66, 67, 68, 69, 70, 71, 72, 73, 74, 75, 76, 77, 78, 79, 80, 81, 82, 83, 84, 85, 86, 87, 88, 89, 90, 91, 92, 93, 94, 95, 96, 97, 98, 99, 100, 101, 102, 103, 104, 105, 106, 107, 108, 109, 110, 111, 112, 113, 114, 115, 116, 117, 118, 119, 120, 121, 122, 123, 124, 125, 126, 127, 128, 129, 130, 131, 132, 133, 134, 135, 136, 137, 138, 139, 140, 141, 142, 143, 144, 145, 146, 147, 148, 149, 150, 151, 152, 153, 154, 155, 156, 157, 158, 159, 160, 161, 162, 163, 164, 165, 166, 167, 168, 169, 170, 171, 172, 173, 174, 175, 176, 177, 178, 179, 180, 181, 182, 183, 184, 185, 186, 187, 188, 189, 190, 191, 192, 193, 194, 195, 196, 197, 198, 199, 200, 201, 202, 203, 204, 205, 206, 207, 208, 209, 210, 211, 212, 213, 214, 215, 216, 217, 218, 219, 220, 221, 222, 223, 224, 225, 226, 227, 228, 229, 230, 231, 232, 233, 234, 235, 236, 237, 238, 239, 240, 241, 242, 243, 244, 245, 246, 247, 248, 249, 250, 251, 252, 253, 254, 255, 256, 257, 258, 259, 260, 261, 262, 263, 264, 265, 266, 267, 268, 269, 270, 271, 272, 273, 274, 275, 276, 277, 278, 279, 280, 281, 282, 283, 284, 285, 286, 287, 288, 289, 290, 291, 292, 293, 294, 295, 296, 297, 298, 299, 300, 301, 312, or 313, a variant, derivative, orthologue, paralogue or homologue thereof, in which:

[0674] the amino acid at Mutated site 4 is Met, and the amino acid at Mutated site 5 is His.

[0675] In another preferred embodiment, the mutated PPO comprises a sequence of SEQ ID NO: 1, 2, 3, 4, 5, 6, 7, 8, 9, 10, 11, 12, 13, 14, 15, 16, 17, 18, 19, 20, 21, 22, 23, 24, 25, 26, 27, 28, 29, 30, 31, 32, 33, 34, 35, 36, 37, 38, 39, 40, 41, 42, 43, 44, 45, 46, 47, 48, 49, 50, 51, 52, 53, 54, 55, 56, 57, 58, 59, 60, 61, 62, 63, 64, 65, 66, 67, 68, 69, 70, 71, 72, 73, 74, 75, 76, 77, 78, 79, 80, 81, 82, 83, 84, 85, 86, 87, 88, 89, 90, 91, 92, 93, 94, 95, 96, 97, 98, 99, 100, 101, 102, 103, 104, 105, 106, 107, 108, 109, 110, 111, 112, 113, 114, 115, 116, 117, 118, 119, 120, 121, 122, 123, 124, 125, 126, 127, 128, 129, 130, 131, 132, 133, 134, 135, 136, 137, 138, 139, 140, 141, 142, 143, 144, 145, 146, 147, 148, 149, 150, 151, 152, 153, 154, 155, 156, 157, 158, 159, 160, 161, 162, 163, 164, 165, 166, 167, 168, 169, 170, 171, 172, 173, 174, 175, 176, 177, 178, 179, 180, 181, 182, 183, 184, 185, 186, 187, 188, 189, 190, 191, 192, 193, 194, 195, 196, 197, 198, 199, 200, 201, 202, 203, 204, 205, 206, 207, 208, 209, 210, 211, 212, 213, 214, 215, 216, 217, 218, 219, 220, 221, 222, 223, 224, 225, 226, 227, 228, 229, 230, 231, 232, 233, 234, 235, 236, 237, 238, 239, 240, 241, 242, 243, 244, 245, 246, 247, 248, 249, 250, 251, 252, 253, 254, 255, 256, 257, 258, 259, 260, 261, 262, 263, 264, 265, 266, 267, 268, 269, 270, 271, 272, 273, 274, 275, 276, 277, 278, 279, 280, 281, 282, 283, 284, 285, 286, 287, 288, 289, 290, 291, 292, 293, 294, 295, 296, 297, 298, 299, 300, 301, 312, or 313, a variant, derivative, orthologue, paralogue or homologue thereof, in which:

[0676] the amino acid at Mutated site 4 is Met, and the amino acid at Mutated site 5 is Lys.

[0677] In another preferred embodiment, the mutated PPO comprises a sequence of SEQ ID NO: 1, 2, 3, 4, 5, 6, 7, 8, 9, 10, 11, 12, 13, 14, 15, 16, 17, 18, 19, 20, 21, 22, 23, 24, 25, 26, 27, 28, 29, 30, 31, 32, 33, 34, 35, 36, 37, 38, 39, 40, 41, 42, 43, 44, 45, 46, 47, 48, 49, 50, 51, 52, 53, 54, 55, 56, 57, 58, 59, 60, 61, 62, 63, 64, 65, 66, 67, 68, 69, 70, 71, 72, 73, 74, 75, 76, 77, 78, 79, 80, 81, 82, 83, 84, 85, 86, 87, 88, 89, 90, 91, 92, 93, 94, 95, 96, 97, 98, 99, 100, 101, 102, 103, 104, 105, 106, 107, 108, 109, 110, 111, 112, 113, 114, 115, 116, 117, 118, 119, 120, 121, 122, 123, 124, 125, 126, 127, 128, 129, 130, 131, 132, 133, 134, 135, 136, 137, 138, 139, 140, 141, 142, 143, 144, 145, 146, 147, 148, 149, 150, 151, 152, 153, 154, 155, 156, 157, 158, 159, 160, 161, 162, 163, 164, 165, 166, 167, 168, 169, 170, 171, 172, 173, 174, 175, 176, 177, 178, 179, 180, 181, 182, 183, 184, 185, 186, 187, 188, 189, 190, 191, 192, 193, 194, 195, 196, 197, 198, 199, 200, 201, 202, 203, 204, 205, 206, 207, 208, 209, 210, 211, 212, 213, 214, 215, 216, 217, 218, 219, 220, 221, 222, 223, 224, 225, 226, 227, 228, 229, 230, 231, 232, 233, 234, 235, 236, 237, 238, 239, 240, 241, 242, 243, 244, 245, 246, 247, 248, 249, 250, 251, 252, 253, 254, 255, 256, 257, 258, 259, 260, 261, 262, 263, 264, 265, 266, 267, 268, 269, 270, 271, 272, 273, 274, 275, 276, 277, 278, 279, 280, 281, 282, 283, 284, 285, 286, 287, 288, 289, 290, 291, 292, 293, 294, 295, 296, 297, 298, 299, 300, 301, 312, or 313, a variant, derivative, orthologue, paralogue or homologue thereof, in which:

[0678] the amino acid at Mutated site 4 is Met, and the amino acid at Mutated site 5 is Asp.

[0679] In another preferred embodiment, the mutated PPO comprises a sequence of SEQ ID NO: 1, 2, 3, 4, 5, 6, 7, 8, 9, 10, 11, 12, 13, 14, 15, 16, 17, 18, 19, 20, 21, 22, 23, 24, 25, 26, 27, 28, 29, 30, 31, 32, 33, 34, 35, 36, 37, 38, 39, 40, 41, 42, 43, 44, 45, 46, 47, 48, 49, 50, 51, 52, 53, 54, 55, 56, 57, 58, 59, 60, 61, 62, 63, 64, 65, 66, 67, 68, 69, 70, 71, 72, 73, 74, 75, 76, 77, 78, 79, 80, 81, 82, 83, 84, 85, 86, 87, 88, 89, 90, 91, 92, 93, 94, 95, 96, 97, 98, 99, 100, 101, 102, 103, 104, 105, 106, 107, 108, 109, 110, 111, 112, 113, 114, 115, 116, 117, 118, 119, 120, 121, 122, 123, 124, 125, 126, 127, 128, 129, 130, 131, 132, 133, 134, 135, 136, 137, 138, 139, 140, 141, 142, 143, 144, 145, 146, 147, 148, 149, 150, 151, 152, 153, 154, 155, 156, 157, 158, 159, 160, 161, 162, 163, 164, 165, 166, 167, 168, 169, 170, 171, 172, 173, 174, 175, 176, 177, 178, 179, 180, 181, 182, 183, 184, 185, 186, 187, 188, 189, 190, 191, 192, 193, 194, 195, 196, 197, 198, 199, 200, 201, 202, 203, 204, 205, 206, 207, 208, 209, 210, 211, 212, 213, 214, 215, 216, 217, 218, 219, 220, 221, 222, 223, 224, 225, 226, 227, 228, 229, 230, 231, 232, 233, 234, 235, 236, 237, 238, 239, 240, 241, 242, 243, 244, 245, 246, 247, 248, 249, 250, 251, 252, 253, 254, 255, 256, 257, 258, 259, 260, 261, 262, 263, 264, 265, 266, 267, 268, 269, 270, 271, 272, 273, 274, 275, 276, 277, 278, 279, 280, 281, 282, 283, 284, 285, 286, 287, 288, 289, 290, 291, 292, 293, 294, 295, 296, 297, 298, 299, 300, 301, 312, or 313, a variant, derivative, orthologue, paralogue or homologue thereof, in which:

[0680] the amino acid at Mutated site 4 is Met, and the amino acid at Mutated site 5 is Glu.

[0681] In another preferred embodiment, the mutated PPO comprises a sequence of SEQ ID NO: 1, 2, 3, 4, 5, 6, 7, 8, 9, 10, 11, 12, 13, 14, 15, 16, 17, 18, 19, 20, 21, 22, 23, 24, 25, 26, 27, 28, 29, 30, 31, 32, 33, 34, 35, 36, 37, 38, 39, 40, 41, 42, 43, 44, 45, 46, 47, 48, 49, 50, 51, 52, 53, 54, 55, 56, 57, 58, 59, 60, 61, 62, 63, 64, 65, 66, 67, 68, 69, 70, 71, 72, 73, 74, 75, 76, 77, 78, 79, 80, 81, 82, 83, 84, 85, 86, 87, 88, 89, 90, 91, 92, 93, 94, 95, 96, 97, 98, 99, 100, 101, 102, 103, 104, 105, 106, 107, 108, 109, 110, 111, 112, 113, 114, 115, 116, 117, 118, 119, 120, 121, 122, 123, 124, 125, 126, 127, 128, 129, 130, 131, 132, 133, 134, 135, 136, 137, 138, 139, 140, 141, 142, 143, 144, 145, 146, 147, 148, 149, 150, 151, 152, 153, 154, 155, 156, 157, 158, 159, 160, 161, 162, 163, 164, 165, 166, 167, 168, 169, 170, 171, 172, 173, 174, 175, 176, 177, 178, 179, 180, 181, 182, 183, 184, 185, 186, 187, 188, 189, 190, 191, 192, 193, 194, 195, 196, 197, 198, 199, 200, 201, 202, 203, 204, 205, 206, 207, 208, 209, 210, 211, 212, 213, 214, 215, 216, 217, 218, 219, 220, 221, 222, 223, 224, 225, 226, 227, 228, 229, 230, 231, 232, 233, 234, 235, 236, 237, 238, 239, 240, 241, 242, 243, 244, 245, 246, 247, 248, 249, 250, 251, 252, 253, 254, 255, 256, 257, 258, 259, 260, 261, 262, 263, 264, 265, 266, 267, 268, 269, 270, 271, 272, 273, 274, 275, 276, 277, 278, 279, 280, 281, 282, 283, 284, 285, 286, 287, 288, 289, 290, 291, 292, 293, 294, 295, 296, 297, 298, 299, 300, 301, 312, or 313, a variant, derivative, orthologue, paralogue or homologue thereof, in which:

[0682] the amino acid at Mutated site 4 is Met, and the amino acid at Mutated site 5 is Ser.

[0683] In another preferred embodiment, the mutated PPO comprises a sequence of SEQ ID NO: 1, 2, 3, 4, 5, 6, 7, 8, 9, 10, 11, 12, 13, 14, 15, 16, 17, 18, 19, 20, 21, 22, 23, 24, 25, 26, 27, 28, 29, 30, 31, 32, 33, 34, 35, 36, 37, 38, 39, 40, 41, 42, 43, 44, 45, 46, 47, 48, 49, 50, 51, 52, 53, 54, 55, 56, 57, 58, 59, 60, 61, 62, 63, 64, 65, 66, 67, 68, 69, 70, 71, 72, 73, 74, 75, 76, 77, 78, 79, 80, 81, 82, 83, 84, 85, 86, 87, 88, 89, 90, 91, 92, 93, 94, 95, 96, 97, 98, 99, 100, 101, 102, 103, 104, 105, 106, 107, 108, 109, 110, 111, 112, 113, 114, 115, 116, 117, 118, 119, 120, 121, 122, 123, 124, 125, 126, 127, 128, 129, 130, 131, 132, 133, 134, 135, 136, 137, 138, 139, 140, 141, 142, 143, 144, 145, 146, 147, 148, 149, 150, 151, 152, 153, 154, 155, 156, 157, 158, 159, 160, 161, 162, 163, 164, 165, 166, 167, 168, 169, 170, 171, 172, 173, 174, 175, 176, 177, 178, 179, 180, 181, 182, 183, 184, 185, 186, 187, 188, 189, 190, 191, 192, 193, 194, 195, 196, 197, 198, 199, 200, 201, 202, 203, 204, 205, 206, 207, 208, 209, 210, 211, 212, 213, 214, 215, 216, 217, 218, 219, 220, 221, 222, 223, 224, 225, 226, 227, 228, 229, 230, 231, 232, 233, 234, 235, 236, 237, 238, 239, 240, 241, 242, 243, 244, 245, 246, 247, 248, 249, 250, 251, 252, 253, 254, 255, 256, 257, 258, 259, 260, 261, 262, 263, 264, 265, 266, 267, 268, 269, 270, 271, 272, 273, 274, 275, 276, 277, 278, 279, 280, 281, 282, 283, 284, 285, 286, 287, 288, 289, 290, 291, 292, 293, 294, 295, 296, 297, 298, 299, 300, 301, 312, or 313, a variant, derivative, orthologue, paralogue or homologue thereof, in which:

[0684] the amino acid at Mutated site 4 is Met, and the amino acid at Mutated site 5 is Thr.

[0685] In another preferred embodiment, the mutated PPO comprises a sequence of SEQ ID NO: 1, 2, 3, 4, 5, 6, 7, 8, 9, 10, 11, 12, 13, 14, 15, 16, 17, 18, 19, 20, 21, 22, 23, 24, 25, 26, 27, 28, 29, 30, 31, 32, 33, 34, 35, 36, 37, 38, 39, 40, 41, 42, 43, 44, 45, 46, 47, 48, 49, 50, 51, 52, 53, 54, 55, 56, 57, 58, 59, 60, 61, 62, 63, 64, 65, 66, 67, 68, 69, 70, 71, 72, 73, 74, 75, 76, 77, 78, 79, 80, 81, 82, 83, 84, 85, 86, 87, 88, 89, 90, 91, 92, 93, 94, 95, 96, 97, 98, 99, 100, 101, 102, 103, 104, 105, 106, 107, 108, 109, 110, 111, 112, 113, 114, 115, 116, 117, 118, 119, 120, 121, 122, 123, 124, 125, 126, 127, 128, 129, 130, 131, 132, 133, 134, 135, 136, 137, 138, 139, 140, 141, 142, 143, 144, 145, 146, 147, 148, 149, 150, 151, 152, 153, 154, 155, 156, 157, 158, 159, 160, 161, 162, 163, 164, 165, 166, 167, 168, 169, 170, 171, 172, 173, 174, 175, 176, 177, 178, 179, 180, 181, 182, 183, 184, 185, 186, 187, 188, 189, 190, 191, 192, 193, 194, 195, 196, 197, 198, 199, 200, 201, 202, 203, 204, 205, 206, 207, 208, 209, 210, 211, 212, 213, 214, 215, 216, 217, 218, 219, 220, 221, 222, 223, 224, 225, 226, 227, 228, 229, 230, 231, 232, 233, 234, 235, 236, 237, 238, 239, 240, 241, 242, 243, 244, 245, 246, 247, 248, 249, 250, 251, 252, 253, 254, 255, 256, 257, 258, 259, 260, 261, 262, 263, 264, 265, 266, 267, 268, 269, 270, 271, 272, 273, 274, 275, 276, 277, 278, 279, 280, 281, 282, 283, 284, 285, 286, 287, 288, 289, 290, 291, 292, 293, 294, 295, 296, 297, 298, 299, 300, 301, 312, or 313, a variant, derivative, orthologue, paralogue or homologue thereof, in which:

[0686] the amino acid at Mutated site 4 is Met, and the amino acid at Mutated site 5 is Asn.

[0687] In another preferred embodiment, the mutated PPO comprises a sequence of SEQ ID NO: 1, 2, 3, 4, 5, 6, 7, 8, 9, 10, 11, 12, 13, 14, 15, 16, 17, 18, 19, 20, 21, 22, 23, 24, 25, 26, 27, 28, 29, 30, 31, 32, 33, 34, 35, 36, 37, 38, 39, 40, 41, 42, 43, 44, 45, 46, 47, 48, 49, 50, 51, 52, 53, 54, 55, 56, 57, 58, 59, 60, 61, 62, 63, 64, 65, 66, 67, 68, 69, 70, 71, 72, 73, 74, 75, 76, 77, 78, 79, 80, 81, 82, 83, 84, 85, 86, 87, 88, 89, 90, 91, 92, 93, 94, 95, 96, 97, 98, 99, 100, 101, 102, 103, 104, 105, 106, 107, 108, 109, 110, 111, 112, 113, 114, 115, 116, 117, 118, 119, 120, 121, 122, 123, 124, 125, 126, 127, 128, 129, 130, 131, 132, 133, 134, 135, 136, 137, 138, 139, 140, 141, 142, 143, 144, 145, 146, 147, 148, 149, 150, 151, 152, 153, 154, 155, 156, 157, 158, 159, 160, 161, 162, 163, 164, 165, 166, 167, 168, 169, 170, 171, 172, 173, 174, 175, 176, 177, 178, 179, 180, 181, 182, 183, 184, 185, 186, 187, 188, 189, 190, 191, 192, 193, 194, 195, 196, 197, 198, 199, 200, 201, 202, 203, 204, 205, 206, 207, 208, 209, 210, 211, 212, 213, 214, 215, 216, 217, 218, 219, 220, 221, 222, 223, 224, 225, 226, 227, 228, 229, 230, 231, 232, 233, 234, 235, 236, 237, 238, 239, 240, 241, 242, 243, 244, 245, 246, 247, 248, 249, 250, 251, 252, 253, 254, 255, 256, 257, 258, 259, 260, 261, 262, 263, 264, 265, 266, 267, 268, 269, 270, 271, 272, 273, 274, 275, 276, 277, 278, 279, 280, 281, 282, 283, 284, 285, 286, 287, 288, 289, 290, 291, 292, 293, 294, 295, 296, 297, 298, 299, 300, 301, 312, or 313, a variant, derivative, orthologue, paralogue or homologue thereof, in which:

[0688] the amino acid at Mutated site 4 is Met, and the amino acid at Mutated site 5 is Gln.

[0689] In another preferred embodiment, the mutated PPO comprises a sequence of SEQ ID NO: 1, 2, 3, 4, 5, 6, 7, 8, 9, 10, 11, 12, 13, 14, 15, 16, 17, 18, 19, 20, 21, 22, 23, 24, 25, 26, 27, 28, 29, 30, 31, 32, 33, 34, 35, 36, 37, 38, 39, 40, 41, 42, 43, 44, 45, 46, 47, 48, 49, 50, 51, 52, 53, 54, 55, 56, 57, 58, 59, 60, 61, 62, 63, 64, 65, 66, 67, 68, 69, 70, 71, 72, 73, 74, 75, 76, 77, 78, 79, 80, 81, 82, 83, 84, 85, 86, 87, 88, 89, 90, 91, 92, 93, 94, 95, 96, 97, 98, 99, 100, 101, 102, 103, 104, 105, 106, 107, 108, 109, 110, 111, 112, 113, 114, 115, 116, 117, 118, 119, 120, 121, 122, 123, 124, 125, 126, 127, 128, 129, 130, 131, 132, 133, 134, 135, 136, 137, 138, 139, 140, 141, 142, 143, 144, 145, 146, 147, 148, 149, 150, 151, 152, 153, 154, 155, 156, 157, 158, 159, 160, 161, 162, 163, 164, 165, 166, 167, 168, 169, 170, 171, 172, 173, 174, 175, 176, 177, 178, 179, 180, 181, 182, 183, 184, 185, 186, 187, 188, 189, 190, 191, 192, 193, 194, 195, 196, 197, 198, 199, 200, 201, 202, 203, 204, 205, 206, 207, 208, 209, 210, 211, 212, 213, 214, 215, 216, 217, 218, 219, 220, 221, 222, 223, 224, 225, 226, 227, 228, 229, 230, 231, 232, 233, 234, 235, 236, 237, 238, 239, 240, 241, 242, 243, 244, 245, 246, 247, 248, 249, 250, 251, 252, 253, 254, 255, 256, 257, 258, 259, 260, 261, 262, 263, 264, 265, 266, 267, 268, 269, 270, 271, 272, 273, 274, 275, 276, 277, 278, 279, 280, 281, 282, 283, 284, 285, 286, 287, 288, 289, 290, 291, 292, 293, 294, 295, 296, 297, 298, 299, 300, 301, 312, or 313, a variant, derivative, orthologue, paralogue or homologue thereof, in which:

[0690] the amino acid at Mutated site 4 is Met, and the amino acid at Mutated site 5 is Cys.

[0691] In another preferred embodiment, the mutated PPO comprises a sequence of SEQ ID NO: 1, 2, 3, 4, 5, 6, 7, 8, 9, 10, 11, 12, 13, 14, 15, 16, 17, 18, 19, 20, 21, 22, 23, 24, 25, 26, 27, 28, 29, 30, 31, 32, 33, 34, 35, 36, 37, 38, 39, 40, 41, 42, 43, 44, 45, 46, 47, 48, 49, 50, 51, 52, 53, 54, 55, 56, 57, 58, 59, 60, 61, 62, 63, 64, 65, 66, 67, 68, 69, 70, 71, 72, 73, 74, 75, 76, 77, 78, 79, 80, 81, 82, 83, 84, 85, 86, 87, 88, 89, 90, 91, 92, 93, 94, 95, 96, 97, 98, 99, 100, 101, 102, 103, 104, 105, 106, 107, 108, 109, 110, 111, 112, 113, 114, 115, 116, 117, 118, 119, 120, 121, 122, 123, 124, 125, 126, 127, 128, 129, 130, 131, 132, 133, 134, 135, 136, 137, 138, 139, 140, 141, 142, 143, 144, 145, 146, 147, 148, 149, 150, 151, 152, 153, 154, 155, 156, 157, 158, 159, 160, 161, 162, 163, 164, 165, 166, 167, 168, 169, 170, 171, 172, 173, 174, 175, 176, 177, 178, 179, 180, 181, 182, 183, 184, 185, 186, 187, 188, 189, 190, 191, 192, 193, 194, 195, 196, 197, 198, 199, 200, 201, 202, 203, 204, 205, 206, 207, 208, 209, 210, 211, 212, 213, 214, 215, 216, 217, 218, 219, 220, 221, 222, 223, 224, 225, 226, 227, 228, 229, 230, 231, 232, 233, 234, 235, 236, 237, 238, 239, 240, 241, 242, 243, 244, 245, 246, 247, 248, 249, 250, 251, 252, 253, 254, 255, 256, 257, 258, 259, 260, 261, 262, 263, 264, 265, 266, 267, 268, 269, 270, 271, 272, 273, 274, 275, 276, 277, 278, 279, 280, 281, 282, 283, 284, 285, 286, 287, 288, 289, 290, 291, 292, 293, 294, 295, 296, 297, 298, 299, 300, 301, 312, or 313, a variant, derivative, orthologue, paralogue or homologue thereof, in which:

[0692] the amino acid at Mutated site 4 is Met, and the amino acid at Mutated site 5 is Gly.

[0693] In another preferred embodiment, the mutated PPO comprises a sequence of SEQ ID NO: 1, 2, 3, 4, 5, 6, 7, 8, 9, 10, 11, 12, 13, 14, 15, 16, 17, 18, 19, 20, 21, 22, 23, 24, 25, 26, 27, 28, 29, 30, 31, 32, 33, 34, 35, 36, 37, 38, 39, 40, 41, 42, 43, 44, 45, 46, 47, 48, 49, 50, 51, 52, 53, 54, 55, 56, 57, 58, 59, 60, 61, 62, 63, 64, 65, 66, 67, 68, 69, 70, 71, 72, 73, 74, 75, 76, 77, 78, 79, 80, 81, 82, 83, 84, 85, 86, 87, 88, 89, 90, 91, 92, 93, 94, 95, 96, 97, 98, 99, 100, 101, 102, 103, 104, 105, 106, 107, 108, 109, 110, 111, 112, 113, 114, 115, 116, 117, 118, 119, 120, 121, 122, 123, 124, 125, 126, 127, 128, 129, 130, 131, 132, 133, 134, 135, 136, 137, 138, 139, 140, 141, 142, 143, 144, 145, 146, 147, 148, 149, 150, 151, 152, 153, 154, 155, 156, 157, 158, 159, 160, 161, 162, 163, 164, 165, 166, 167, 168, 169, 170, 171, 172, 173, 174, 175, 176, 177, 178, 179, 180, 181, 182, 183, 184, 185, 186, 187, 188, 189, 190, 191, 192, 193, 194, 195, 196, 197, 198, 199, 200, 201, 202, 203, 204, 205, 206, 207, 208, 209, 210, 211, 212, 213, 214, 215, 216, 217, 218, 219, 220, 221, 222, 223, 224, 225, 226, 227, 228, 229, 230, 231, 232, 233, 234, 235, 236, 237, 238, 239, 240, 241, 242, 243, 244, 245, 246, 247, 248, 249, 250, 251, 252, 253, 254, 255, 256, 257, 258, 259, 260, 261, 262, 263, 264, 265, 266, 267, 268, 269, 270, 271, 272, 273, 274, 275, 276, 277, 278, 279, 280, 281, 282, 283, 284, 285, 286, 287, 288, 289, 290, 291, 292, 293, 294, 295, 296, 297, 298, 299, 300, 301, 312, or 313, a variant, derivative, orthologue, paralogue or homologue thereof, in which:

[0694] the amino acid at Mutated site 4 is Met, and the amino acid at Mutated site 5 is Pro.

[0695] In another preferred embodiment, the mutated PPO comprises a sequence of SEQ ID NO: 1, 2, 3, 4, 5, 6, 7, 8, 9, 10, 11, 12, 13, 14, 15, 16, 17, 18, 19, 20, 21, 22, 23, 24, 25, 26, 27, 28, 29, 30, 31, 32, 33, 34, 35, 36, 37, 38, 39, 40, 41, 42, 43, 44, 45, 46, 47, 48, 49, 50, 51, 52, 53, 54, 55, 56, 57, 58, 59, 60, 61, 62, 63, 64, 65, 66, 67, 68, 69, 70, 71, 72, 73, 74, 75, 76, 77, 78, 79, 80, 81, 82, 83, 84, 85, 86, 87, 88, 89, 90, 91, 92, 93, 94, 95, 96, 97, 98, 99, 100, 101, 102, 103, 104, 105, 106, 107, 108, 109, 110, 111, 112, 113, 114, 115, 116, 117, 118, 119, 120, 121, 122, 123, 124, 125, 126, 127, 128, 129, 130, 131, 132, 133, 134, 135, 136, 137, 138, 139, 140, 141, 142, 143, 144, 145, 146, 147, 148, 149, 150, 151, 152, 153, 154, 155, 156, 157, 158, 159, 160, 161, 162, 163, 164, 165, 166, 167, 168, 169, 170, 171, 172, 173, 174, 175, 176, 177, 178, 179, 180, 181, 182, 183, 184, 185, 186, 187, 188, 189, 190, 191, 192, 193, 194, 195, 196, 197, 198, 199, 200, 201, 202, 203, 204, 205, 206, 207, 208, 209, 210, 211, 212, 213, 214, 215, 216, 217, 218, 219, 220, 221, 222, 223, 224, 225, 226, 227, 228, 229, 230, 231, 232, 233, 234, 235, 236, 237, 238, 239, 240, 241, 242, 243, 244, 245, 246, 247, 248, 249, 250, 251, 252, 253, 254, 255, 256, 257, 258, 259, 260, 261, 262, 263, 264, 265, 266, 267, 268, 269, 270, 271, 272, 273, 274, 275, 276, 277, 278, 279, 280, 281, 282, 283, 284, 285, 286, 287, 288, 289, 290, 291, 292, 293, 294, 295, 296, 297, 298, 299, 300, 301, 312, or 313, a variant, derivative, orthologue, paralogue or homologue thereof, in which:

[0696] the amino acid at Mutated site 4 is Met, and the amino acid at Mutated site 5 is Arg.

[0697] In another preferred embodiment, the mutated PPO comprises a sequence of SEQ ID NO: 1, 2, 3, 4, 5, 6, 7, 8, 9, 10, 11, 12, 13, 14, 15, 16, 17, 18, 19, 20, 21, 22, 23, 24, 25, 26, 27, 28, 29, 30, 31, 32, 33, 34, 35, 36, 37, 38, 39, 40, 41, 42, 43, 44, 45, 46, 47, 48, 49, 50, 51, 52, 53, 54, 55, 56, 57, 58, 59, 60, 61, 62, 63, 64, 65, 66, 67, 68, 69, 70, 71, 72, 73, 74, 75, 76, 77, 78, 79, 80, 81, 82, 83, 84, 85, 86, 87, 88, 89, 90, 91, 92, 93, 94, 95, 96, 97, 98, 99, 100, 101, 102, 103, 104, 105, 106, 107, 108, 109, 110, 111, 112, 113, 114, 115, 116, 117, 118, 119, 120, 121, 122, 123, 124, 125, 126, 127, 128, 129, 130, 131, 132, 133, 134, 135, 136, 137, 138, 139, 140, 141, 142, 143, 144, 145, 146, 147, 148, 149, 150, 151, 152, 153, 154, 155, 156, 157, 158, 159, 160, 161, 162, 163, 164, 165, 166, 167, 168, 169, 170, 171, 172, 173, 174, 175, 176, 177, 178, 179, 180, 181, 182, 183, 184, 185, 186, 187, 188, 189, 190, 191, 192, 193, 194, 195, 196, 197, 198, 199, 200, 201, 202, 203, 204, 205, 206, 207, 208, 209, 210, 211, 212, 213, 214, 215, 216, 217, 218, 219, 220, 221, 222, 223, 224, 225, 226, 227, 228, 229, 230, 231, 232, 233, 234, 235, 236, 237, 238, 239, 240, 241, 242, 243, 244, 245, 246, 247, 248, 249, 250, 251, 252, 253, 254, 255, 256, 257, 258, 259, 260, 261, 262, 263, 264, 265, 266, 267, 268, 269, 270, 271, 272, 273, 274, 275, 276, 277, 278, 279, 280, 281, 282, 283, 284, 285, 286, 287, 288, 289, 290, 291, 292, 293, 294, 295, 296, 297, 298, 299, 300, 301, 312, or 313, a variant, derivative, orthologue, paralogue or homologue thereof, in which:

[0698] the amino acid at Mutated site 4 is Met, and the amino acid at Mutated site 5 is Tyr.

[0699] In another preferred embodiment, the mutated PPO comprises a sequence of SEQ ID NO: 1, 2, 3, 4, 5, 6, 7, 8, 9, 10, 11, 12, 13, 14, 15, 16, 17, 18, 19, 20, 21, 22, 23, 24, 25, 26, 27, 28, 29, 30, 31, 32, 33, 34, 35, 36, 37, 38, 39, 40, 41, 42, 43, 44, 45, 46, 47, 48, 49, 50, 51, 52, 53, 54, 55, 56, 57, 58, 59, 60, 61, 62, 63, 64, 65, 66, 67, 68, 69, 70, 71, 72, 73, 74, 75, 76, 77, 78, 79, 80, 81, 82, 83, 84, 85, 86, 87, 88, 89, 90, 91, 92, 93, 94, 95, 96, 97, 98, 99, 100, 101, 102, 103, 104, 105, 106, 107, 108, 109, 110, 111, 112, 113, 114, 115, 116, 117, 118, 119, 120, 121, 122, 123, 124, 125, 126, 127, 128, 129, 130, 131, 132, 133, 134, 135, 136, 137, 138, 139, 140, 141, 142, 143, 144, 145, 146, 147, 148, 149, 150, 151, 152, 153, 154, 155, 156, 157, 158, 159, 160, 161, 162, 163, 164, 165, 166, 167, 168, 169, 170, 171, 172, 173, 174, 175, 176, 177, 178, 179, 180, 181, 182, 183, 184, 185, 186, 187, 188, 189, 190, 191, 192, 193, 194, 195, 196, 197, 198, 199, 200, 201, 202, 203, 204, 205, 206, 207, 208, 209, 210, 211, 212, 213, 214, 215, 216, 217, 218, 219, 220, 221, 222, 223, 224, 225, 226, 227, 228, 229, 230, 231, 232, 233, 234, 235, 236, 237, 238, 239, 240, 241, 242, 243, 244, 245, 246, 247, 248, 249, 250, 251, 252, 253, 254, 255, 256, 257, 258, 259, 260, 261, 262, 263, 264, 265, 266, 267, 268, 269, 270, 271, 272, 273, 274, 275, 276, 277, 278, 279, 280, 281, 282, 283, 284, 285, 286, 287, 288, 289, 290, 291, 292, 293, 294, 295, 296, 297, 298, 299, 300, 301, 312, or 313, a variant, derivative, orthologue, paralogue or homologue thereof, in which:

[0700] the amino acid at Mutated site 4 is Met, and the amino acid at Mutated site 5 is Trp.

[0701] In another preferred embodiment, the mutated PPO comprises a sequence of SEQ ID NO: 1, 2, 3, 4, 5, 6, 7, 8, 9, 10, 11, 12, 13, 14, 15, 16, 17, 18, 19, 20, 21, 22, 23, 24, 25, 26, 27, 28, 29, 30, 31, 32, 33, 34, 35, 36, 37, 38, 39, 40, 41, 42, 43, 44, 45, 46, 47, 48, 49, 50, 51, 52, 53, 54, 55, 56, 57, 58, 59, 60, 61, 62, 63, 64, 65, 66, 67, 68, 69, 70, 71, 72, 73, 74, 75, 76, 77, 78, 79, 80, 81, 82, 83, 84, 85, 86, 87, 88, 89, 90, 91, 92, 93, 94, 95, 96, 97, 98, 99, 100, 101, 102, 103, 104, 105, 106, 107, 108, 109, 110, 111, 112, 113, 114, 115, 116, 117, 118, 119, 120, 121, 122, 123, 124, 125, 126, 127, 128, 129, 130, 131, 132, 133, 134, 135, 136, 137, 138, 139, 140, 141, 142, 143, 144, 145, 146, 147, 148, 149, 150, 151, 152, 153, 154, 155, 156, 157, 158, 159, 160, 161, 162, 163, 164, 165, 166, 167, 168, 169, 170, 171, 172, 173, 174, 175, 176, 177, 178, 179, 180, 181, 182, 183, 184, 185, 186, 187, 188, 189, 190, 191, 192, 193, 194, 195, 196, 197, 198, 199, 200, 201, 202, 203, 204, 205, 206, 207, 208, 209, 210, 211, 212, 213, 214, 215, 216, 217, 218, 219, 220, 221, 222, 223, 224, 225, 226, 227, 228, 229, 230, 231, 232, 233, 234, 235, 236, 237, 238, 239, 240, 241, 242, 243, 244, 245, 246, 247, 248, 249, 250, 251, 252, 253, 254, 255, 256, 257, 258, 259, 260, 261, 262, 263, 264, 265, 266, 267, 268, 269, 270, 271, 272, 273, 274, 275, 276, 277, 278, 279, 280, 281, 282, 283, 284, 285, 286, 287, 288, 289, 290, 291, 292, 293, 294, 295, 296, 297, 298, 299, 300, 301, 312, or 313, a variant, derivative, orthologue, paralogue or homologue thereof, in which:

[0702] the amino acid at Mutated site 4 is His, and the amino acid at Mutated site 5 is Ala.

[0703] In another preferred embodiment, the mutated PPO comprises a sequence of SEQ ID NO: 1, 2, 3, 4, 5, 6, 7, 8, 9, 10, 11, 12, 13, 14, 15, 16, 17, 18, 19, 20, 21, 22, 23, 24, 25, 26, 27, 28, 29, 30, 31, 32, 33, 34, 35, 36, 37, 38, 39, 40, 41, 42, 43, 44, 45, 46, 47, 48, 49, 50, 51, 52, 53, 54, 55, 56, 57, 58, 59, 60, 61, 62, 63, 64, 65, 66, 67, 68, 69, 70, 71, 72, 73, 74, 75, 76, 77, 78, 79, 80, 81, 82, 83, 84, 85, 86, 87, 88, 89, 90, 91, 92, 93, 94, 95, 96, 97, 98, 99, 100, 101, 102, 103, 104, 105, 106, 107, 108, 109, 110, 111, 112, 113, 114, 115, 116, 117, 118, 119, 120, 121, 122, 123, 124, 125, 126, 127, 128, 129, 130, 131, 132, 133, 134, 135, 136, 137, 138, 139, 140, 141, 142, 143, 144, 145, 146, 147, 148, 149, 150, 151, 152, 153, 154, 155, 156, 157, 158, 159, 160, 161, 162, 163, 164, 165, 166, 167, 168, 169, 170, 171, 172, 173, 174, 175, 176, 177, 178, 179, 180, 181, 182, 183, 184, 185, 186, 187, 188, 189, 190, 191, 192, 193, 194, 195, 196, 197, 198, 199, 200, 201, 202, 203, 204, 205, 206, 207, 208, 209, 210, 211, 212, 213, 214, 215, 216, 217, 218, 219, 220, 221, 222, 223, 224, 225, 226, 227, 228, 229, 230, 231, 232, 233, 234, 235, 236, 237, 238, 239, 240, 241, 242, 243, 244, 245, 246, 247, 248, 249, 250, 251, 252, 253, 254, 255, 256, 257, 258, 259, 260, 261, 262, 263, 264, 265, 266, 267, 268, 269, 270, 271, 272, 273, 274, 275, 276, 277, 278, 279, 280, 281, 282, 283, 284, 285, 286, 287, 288, 289, 290, 291, 292, 293, 294, 295, 296, 297, 298, 299, 300, 301, 312, or 313, a variant, derivative, orthologue, paralogue or homologue thereof, in which:

[0704] the amino acid at Mutated site 4 is His, and the amino acid at Mutated site 5 is Leu.

[0705] In another preferred embodiment, the mutated PPO comprises a sequence of SEQ ID NO: 1, 2, 3, 4, 5, 6, 7, 8, 9, 10, 11, 12, 13, 14, 15, 16, 17, 18, 19, 20, 21, 22, 23, 24, 25, 26, 27, 28, 29, 30, 31, 32, 33, 34, 35, 36, 37, 38, 39, 40, 41, 42, 43, 44, 45, 46, 47, 48, 49, 50, 51, 52, 53, 54, 55, 56, 57, 58, 59, 60, 61, 62, 63, 64, 65, 66, 67, 68, 69, 70, 71, 72, 73, 74, 75, 76, 77, 78, 79, 80, 81, 82, 83, 84, 85, 86, 87, 88, 89, 90, 91, 92, 93, 94, 95, 96, 97, 98, 99, 100, 101, 102, 103, 104, 105, 106, 107, 108, 109, 110, 111, 112, 113, 114, 115, 116, 117, 118, 119, 120, 121, 122, 123, 124, 125, 126, 127, 128, 129, 130, 131, 132, 133, 134, 135, 136, 137, 138, 139, 140, 141, 142, 143, 144, 145, 146, 147, 148, 149, 150, 151, 152, 153, 154, 155, 156, 157, 158, 159, 160, 161, 162, 163, 164, 165, 166, 167, 168, 169, 170, 171, 172, 173, 174, 175, 176, 177, 178, 179, 180, 181, 182, 183, 184, 185, 186, 187, 188, 189, 190, 191, 192, 193, 194, 195, 196, 197, 198, 199, 200, 201, 202, 203, 204, 205, 206, 207, 208, 209, 210, 211, 212, 213, 214, 215, 216, 217, 218, 219, 220, 221, 222, 223, 224, 225, 226, 227, 228, 229, 230, 231, 232, 233, 234, 235, 236, 237, 238, 239, 240, 241, 242, 243, 244, 245, 246, 247, 248, 249, 250, 251, 252, 253, 254, 255, 256, 257, 258, 259, 260, 261, 262, 263, 264, 265, 266, 267, 268, 269, 270, 271, 272, 273, 274, 275, 276, 277, 278, 279, 280, 281, 282, 283, 284, 285, 286, 287, 288, 289, 290, 291, 292, 293, 294, 295, 296, 297, 298, 299, 300, 301, 312, or 313, a variant, derivative, orthologue, paralogue or homologue thereof, in which:

[0706] the amino acid at Mutated site 4 is His, and the amino acid at Mutated site 5 is Val.

[0707] In another preferred embodiment, the mutated PPO comprises a sequence of SEQ ID NO: 1, 2, 3, 4, 5, 6, 7, 8, 9, 10, 11, 12, 13, 14, 15, 16, 17, 18, 19, 20, 21, 22, 23, 24, 25, 26, 27, 28, 29, 30, 31, 32, 33, 34, 35, 36, 37, 38, 39, 40, 41, 42, 43, 44, 45, 46, 47, 48, 49, 50, 51, 52, 53, 54, 55, 56, 57, 58, 59, 60, 61, 62, 63, 64, 65, 66, 67, 68, 69, 70, 71, 72, 73, 74, 75, 76, 77, 78, 79, 80, 81, 82, 83, 84, 85, 86, 87, 88, 89, 90, 91, 92, 93, 94, 95, 96, 97, 98, 99, 100, 101, 102, 103, 104, 105, 106, 107, 108, 109, 110, 111, 112, 113, 114, 115, 116, 117, 118, 119, 120, 121, 122, 123, 124, 125, 126, 127, 128, 129, 130, 131, 132, 133, 134, 135, 136, 137, 138, 139, 140, 141, 142, 143, 144, 145, 146, 147, 148, 149, 150, 151, 152, 153, 154, 155, 156, 157, 158, 159, 160, 161, 162, 163, 164, 165, 166, 167, 168, 169, 170, 171, 172, 173, 174, 175, 176, 177, 178, 179, 180, 181, 182, 183, 184, 185, 186, 187, 188, 189, 190, 191, 192, 193, 194, 195, 196, 197, 198, 199, 200, 201, 202, 203, 204, 205, 206, 207, 208, 209, 210, 211, 212, 213, 214, 215, 216, 217, 218, 219, 220, 221, 222, 223, 224, 225, 226, 227, 228, 229, 230, 231, 232, 233, 234, 235, 236, 237, 238, 239, 240, 241, 242, 243, 244, 245, 246, 247, 248, 249, 250, 251, 252, 253, 254, 255, 256, 257, 258, 259, 260, 261, 262, 263, 264, 265, 266, 267, 268, 269, 270, 271, 272, 273, 274, 275, 276, 277, 278, 279, 280, 281, 282, 283, 284, 285, 286, 287, 288, 289, 290, 291, 292, 293, 294, 295, 296, 297, 298, 299, 300, 301, 312, or 313, a variant, derivative, orthologue, paralogue or homologue thereof, in which:

[0708] the amino acid at Mutated site 4 is His, and the amino acid at Mutated site 5 is Ile.

[0709] In another preferred embodiment, the mutated PPO comprises a sequence of SEQ ID NO: 1, 2, 3, 4, 5, 6, 7, 8, 9, 10, 11, 12, 13, 14, 15, 16, 17, 18, 19, 20, 21, 22, 23, 24, 25, 26, 27, 28, 29, 30, 31, 32, 33, 34, 35, 36, 37, 38, 39, 40, 41, 42, 43, 44, 45, 46, 47, 48, 49, 50, 51, 52, 53, 54, 55, 56, 57, 58, 59, 60, 61, 62, 63, 64, 65, 66, 67, 68, 69, 70, 71, 72, 73, 74, 75, 76, 77, 78, 79, 80, 81, 82, 83, 84, 85, 86, 87, 88, 89, 90, 91, 92, 93, 94, 95, 96, 97, 98, 99, 100, 101, 102, 103, 104, 105, 106, 107, 108, 109, 110, 111, 112, 113, 114, 115, 116, 117, 118, 119, 120, 121, 122, 123, 124, 125, 126, 127, 128, 129, 130, 131, 132, 133, 134, 135, 136, 137, 138, 139, 140, 141, 142, 143, 144, 145, 146, 147, 148, 149, 150, 151, 152, 153, 154, 155, 156, 157, 158, 159, 160, 161, 162, 163, 164, 165, 166, 167, 168, 169, 170, 171, 172, 173, 174, 175, 176, 177, 178, 179, 180, 181, 182, 183, 184, 185, 186, 187, 188, 189, 190, 191, 192, 193, 194, 195, 196, 197, 198, 199, 200, 201, 202, 203, 204, 205, 206, 207, 208, 209, 210, 211, 212, 213, 214, 215, 216, 217, 218, 219, 220, 221, 222, 223, 224, 225, 226, 227, 228, 229, 230, 231, 232, 233, 234, 235, 236, 237, 238, 239, 240, 241, 242, 243, 244, 245, 246, 247, 248, 249, 250, 251, 252, 253, 254, 255, 256, 257, 258, 259, 260, 261, 262, 263, 264, 265, 266, 267, 268, 269, 270, 271, 272, 273, 274, 275, 276, 277, 278, 279, 280, 281, 282, 283, 284, 285, 286, 287, 288, 289, 290, 291, 292, 293, 294, 295, 296, 297, 298, 299, 300, 301, 312, or 313, a variant, derivative, orthologue, paralogue or homologue thereof, in which:

[0710] the amino acid at Mutated site 4 is His, and the amino acid at Mutated site 5 is Met.

[0711] In another preferred embodiment, the mutated PPO comprises a sequence of SEQ ID NO: 1, 2, 3, 4, 5, 6, 7, 8, 9, 10, 11, 12, 13, 14, 15, 16, 17, 18, 19, 20, 21, 22, 23, 24, 25, 26, 27, 28, 29, 30, 31, 32, 33, 34, 35, 36, 37, 38, 39, 40, 41, 42, 43, 44, 45, 46, 47, 48, 49, 50, 51, 52, 53, 54, 55, 56, 57, 58, 59, 60, 61, 62, 63, 64, 65, 66, 67, 68, 69, 70, 71, 72, 73, 74, 75, 76, 77, 78, 79, 80, 81, 82, 83, 84, 85, 86, 87, 88, 89, 90, 91, 92, 93, 94, 95, 96, 97, 98, 99, 100, 101, 102, 103, 104, 105, 106, 107, 108, 109, 110, 111, 112, 113, 114, 115, 116, 117, 118, 119, 120, 121, 122, 123, 124, 125, 126, 127, 128, 129, 130, 131, 132, 133, 134, 135, 136, 137, 138, 139, 140, 141, 142, 143, 144, 145, 146, 147, 148, 149, 150, 151, 152, 153, 154, 155, 156, 157, 158, 159, 160, 161, 162, 163, 164, 165, 166, 167, 168, 169, 170, 171, 172, 173, 174, 175, 176, 177, 178, 179, 180, 181, 182, 183, 184, 185, 186, 187, 188, 189, 190, 191, 192, 193, 194, 195, 196, 197, 198, 199, 200, 201, 202, 203, 204, 205, 206, 207, 208, 209, 210, 211, 212, 213, 214, 215, 216, 217, 218, 219, 220, 221, 222, 223, 224, 225, 226, 227, 228, 229, 230, 231, 232, 233, 234, 235, 236, 237, 238, 239, 240, 241, 242, 243, 244, 245, 246, 247, 248, 249, 250, 251, 252, 253, 254, 255, 256, 257, 258, 259, 260, 261, 262, 263, 264, 265, 266, 267, 268, 269, 270, 271, 272, 273, 274, 275, 276, 277, 278, 279, 280, 281, 282, 283, 284, 285, 286, 287, 288, 289, 290, 291, 292, 293, 294, 295, 296, 297, 298, 299, 300, 301, 312, or 313, a variant, derivative, orthologue, paralogue or homologue thereof, in which:

[0712] the amino acid at Mutated site 4 is His, and the amino acid at Mutated site 5 is His.

[0713] In another preferred embodiment, the mutated PPO comprises a sequence of SEQ ID NO: 1, 2, 3, 4, 5, 6, 7, 8, 9, 10, 11, 12, 13, 14, 15, 16, 17, 18, 19, 20, 21, 22, 23, 24, 25, 26, 27, 28, 29, 30, 31, 32, 33, 34, 35, 36, 37, 38, 39, 40, 41, 42, 43, 44, 45, 46, 47, 48, 49, 50, 51, 52, 53, 54, 55, 56, 57, 58, 59, 60, 61, 62, 63, 64, 65, 66, 67, 68, 69, 70, 71, 72, 73, 74, 75, 76, 77, 78, 79, 80, 81, 82, 83, 84, 85, 86, 87, 88, 89, 90, 91, 92, 93, 94, 95, 96, 97, 98, 99, 100, 101, 102, 103, 104, 105, 106, 107, 108, 109, 110, 111, 112, 113, 114, 115, 116, 117, 118, 119, 120, 121, 122, 123, 124, 125, 126, 127, 128, 129, 130, 131, 132, 133, 134, 135, 136, 137, 138, 139, 140, 141, 142, 143, 144, 145, 146, 147, 148, 149, 150, 151, 152, 153, 154, 155, 156, 157, 158, 159, 160, 161, 162, 163, 164, 165, 166, 167, 168, 169, 170, 171, 172, 173, 174, 175, 176, 177, 178, 179, 180, 181, 182, 183, 184, 185, 186, 187, 188, 189, 190, 191, 192, 193, 194, 195, 196, 197, 198, 199, 200, 201, 202, 203, 204, 205, 206, 207, 208, 209, 210, 211, 212, 213, 214, 215, 216, 217, 218, 219, 220, 221, 222, 223, 224, 225, 226, 227, 228, 229, 230, 231, 232, 233, 234, 235, 236, 237, 238, 239, 240, 241, 242, 243, 244, 245, 246, 247, 248, 249, 250, 251, 252, 253, 254, 255, 256, 257, 258, 259, 260, 261, 262, 263, 264, 265, 266, 267, 268, 269, 270, 271, 272, 273, 274, 275, 276, 277, 278, 279, 280, 281, 282, 283, 284, 285, 286, 287, 288, 289, 290, 291, 292, 293, 294, 295, 296, 297, 298, 299, 300, 301, 312, or 313, a variant, derivative, orthologue, paralogue or homologue thereof, in which:

[0714] the amino acid at Mutated site 4 is His, and the amino acid at Mutated site 5 is Lys.

[0715] In another preferred embodiment, the mutated PPO comprises a sequence of SEQ ID NO: 1, 2, 3, 4, 5, 6, 7, 8, 9, 10, 11, 12, 13, 14, 15, 16, 17, 18, 19, 20, 21, 22, 23, 24, 25, 26, 27, 28, 29, 30, 31, 32, 33, 34, 35, 36, 37, 38, 39, 40, 41, 42, 43, 44, 45, 46, 47, 48, 49, 50, 51, 52, 53, 54, 55, 56, 57, 58, 59, 60, 61, 62, 63, 64, 65, 66, 67, 68, 69, 70, 71, 72, 73, 74, 75, 76, 77, 78, 79, 80, 81, 82, 83, 84, 85, 86, 87, 88, 89, 90, 91, 92, 93, 94, 95, 96, 97, 98, 99, 100, 101, 102, 103, 104, 105, 106, 107, 108, 109, 110, 111, 112, 113, 114, 115, 116, 117, 118, 119, 120, 121, 122, 123, 124, 125, 126, 127, 128, 129, 130, 131, 132, 133, 134, 135, 136, 137, 138, 139, 140, 141, 142, 143, 144, 145, 146, 147, 148, 149, 150, 151, 152, 153, 154, 155, 156, 157, 158, 159, 160, 161, 162, 163, 164, 165, 166, 167, 168, 169, 170, 171, 172, 173, 174, 175, 176, 177, 178, 179, 180, 181, 182, 183, 184, 185, 186, 187, 188, 189, 190, 191, 192, 193, 194, 195, 196, 197, 198, 199, 200, 201, 202, 203, 204, 205, 206, 207, 208, 209, 210, 211, 212, 213, 214, 215, 216, 217, 218, 219, 220, 221, 222, 223, 224, 225, 226, 227, 228, 229, 230, 231, 232, 233, 234, 235, 236, 237, 238, 239, 240, 241, 242, 243, 244, 245, 246, 247, 248, 249, 250, 251, 252, 253, 254, 255, 256, 257, 258, 259, 260, 261, 262, 263, 264, 265, 266, 267, 268, 269, 270, 271, 272, 273, 274, 275, 276, 277, 278, 279, 280, 281, 282, 283, 284, 285, 286, 287, 288, 289, 290, 291, 292, 293, 294, 295, 296, 297, 298, 299, 300, 301, 312, or 313, a variant, derivative, orthologue, paralogue or homologue thereof, in which:

[0716] the amino acid at Mutated site 4 is His, and the amino acid at Mutated site 5 is Asp.

[0717] In another preferred embodiment, the mutated PPO comprises a sequence of SEQ ID NO: 1, 2, 3, 4, 5, 6, 7, 8, 9, 10, 11, 12, 13, 14, 15, 16, 17, 18, 19, 20, 21, 22, 23, 24, 25, 26, 27, 28, 29, 30, 31, 32, 33, 34, 35, 36, 37, 38, 39, 40, 41, 42, 43, 44, 45, 46, 47, 48, 49, 50, 51, 52, 53, 54, 55, 56, 57, 58, 59, 60, 61, 62, 63, 64, 65, 66, 67, 68, 69, 70, 71, 72, 73, 74, 75, 76, 77, 78, 79, 80, 81, 82, 83, 84, 85, 86, 87, 88, 89, 90, 91, 92, 93, 94, 95, 96, 97, 98, 99, 100, 101, 102, 103, 104, 105, 106, 107, 108, 109, 110, 111, 112, 113, 114, 115, 116, 117, 118, 119, 120, 121, 122, 123, 124, 125, 126, 127, 128, 129, 130, 131, 132, 133, 134, 135, 136, 137, 138, 139, 140, 141, 142, 143, 144, 145, 146, 147, 148, 149, 150, 151, 152, 153, 154, 155, 156, 157, 158, 159, 160, 161, 162, 163, 164, 165, 166, 167, 168, 169, 170, 171, 172, 173, 174, 175, 176, 177, 178, 179, 180, 181, 182, 183, 184, 185, 186, 187, 188, 189, 190, 191, 192, 193, 194, 195, 196, 197, 198, 199, 200, 201, 202, 203, 204, 205, 206, 207, 208, 209, 210, 211, 212, 213, 214, 215, 216, 217, 218, 219, 220, 221, 222, 223, 224, 225, 226, 227, 228, 229, 230, 231, 232, 233, 234, 235, 236, 237, 238, 239, 240, 241, 242, 243, 244, 245, 246, 247, 248, 249, 250, 251, 252, 253, 254, 255, 256, 257, 258, 259, 260, 261, 262, 263, 264, 265, 266, 267, 268, 269, 270, 271, 272, 273, 274, 275, 276, 277, 278, 279, 280, 281, 282, 283, 284, 285, 286, 287, 288, 289, 290, 291, 292, 293, 294, 295, 296, 297, 298, 299, 300, 301, 312, or 313, a variant, derivative, orthologue, paralogue or homologue thereof, in which:

[0718] the amino acid at Mutated site 4 is His, and the amino acid at Mutated site 5 is Glu.

[0719] In another preferred embodiment, the mutated PPO comprises a sequence of SEQ ID NO: 1, 2, 3, 4, 5, 6, 7, 8, 9, 10, 11, 12, 13, 14, 15, 16, 17, 18, 19, 20, 21, 22, 23, 24, 25, 26, 27, 28, 29, 30, 31, 32, 33, 34, 35, 36, 37, 38, 39, 40, 41, 42, 43, 44, 45, 46, 47, 48, 49, 50, 51, 52, 53, 54, 55, 56, 57, 58, 59, 60, 61, 62, 63, 64, 65, 66, 67, 68, 69, 70, 71, 72, 73, 74, 75, 76, 77, 78, 79, 80, 81, 82, 83, 84, 85, 86, 87, 88, 89, 90, 91, 92, 93, 94, 95, 96, 97, 98, 99, 100, 101, 102, 103, 104, 105, 106, 107, 108, 109, 110, 111, 112, 113, 114, 115, 116, 117, 118, 119, 120, 121, 122, 123, 124, 125, 126, 127, 128, 129, 130, 131, 132, 133, 134, 135, 136, 137, 138, 139, 140, 141, 142, 143, 144, 145, 146, 147, 148, 149, 150, 151, 152, 153, 154, 155, 156, 157, 158, 159, 160, 161, 162, 163, 164, 165, 166, 167, 168, 169, 170, 171, 172, 173, 174, 175, 176, 177, 178, 179, 180, 181, 182, 183, 184, 185, 186, 187, 188, 189, 190, 191, 192, 193, 194, 195, 196, 197, 198, 199, 200, 201, 202, 203, 204, 205, 206, 207, 208, 209, 210, 211, 212, 213, 214, 215, 216, 217, 218, 219, 220, 221, 222, 223, 224, 225, 226, 227, 228, 229, 230, 231, 232, 233, 234, 235, 236, 237, 238, 239, 240, 241, 242, 243, 244, 245, 246, 247, 248, 249, 250, 251, 252, 253, 254, 255, 256, 257, 258, 259, 260, 261, 262, 263, 264, 265, 266, 267, 268, 269, 270, 271, 272, 273, 274, 275, 276, 277, 278, 279, 280, 281, 282, 283, 284, 285, 286, 287, 288, 289, 290, 291, 292, 293, 294, 295, 296, 297, 298, 299, 300, 301, 312, or 313, a variant, derivative, orthologue, paralogue or homologue thereof, in which:

[0720] the amino acid at Mutated site 4 is His, and the amino acid at Mutated site 5 is Ser.

[0721] In another preferred embodiment, the mutated PPO comprises a sequence of SEQ ID NO: 1, 2, 3, 4, 5, 6, 7, 8, 9, 10, 11, 12, 13, 14, 15, 16, 17, 18, 19, 20, 21, 22, 23, 24, 25, 26, 27, 28, 29, 30, 31, 32, 33, 34, 35, 36, 37, 38, 39, 40, 41, 42, 43, 44, 45, 46, 47, 48, 49, 50, 51, 52, 53, 54, 55, 56, 57, 58, 59, 60, 61, 62, 63, 64, 65, 66, 67, 68, 69, 70, 71, 72, 73, 74, 75, 76, 77, 78, 79, 80, 81, 82, 83, 84, 85, 86, 87, 88, 89, 90, 91, 92, 93, 94, 95, 96, 97, 98, 99, 100, 101, 102, 103, 104, 105, 106, 107, 108, 109, 110, 111, 112, 113, 114, 115, 116, 117, 118, 119, 120, 121, 122, 123, 124, 125, 126, 127, 128, 129, 130, 131, 132, 133, 134, 135, 136, 137, 138, 139, 140, 141, 142, 143, 144, 145, 146, 147, 148, 149, 150, 151, 152, 153, 154, 155, 156, 157, 158, 159, 160, 161, 162, 163, 164, 165, 166, 167, 168, 169, 170, 171, 172, 173, 174, 175, 176, 177, 178, 179, 180, 181, 182, 183, 184, 185, 186, 187, 188, 189, 190, 191, 192, 193, 194, 195, 196, 197, 198, 199, 200, 201, 202, 203, 204, 205, 206, 207, 208, 209, 210, 211, 212, 213, 214, 215, 216, 217, 218, 219, 220, 221, 222, 223, 224, 225, 226, 227, 228, 229, 230, 231, 232, 233, 234, 235, 236, 237, 238, 239, 240, 241, 242, 243, 244, 245, 246, 247, 248, 249, 250, 251, 252, 253, 254, 255, 256, 257, 258, 259, 260, 261, 262, 263, 264, 265, 266, 267, 268, 269, 270, 271, 272, 273, 274, 275, 276, 277, 278, 279, 280, 281, 282, 283, 284, 285, 286, 287, 288, 289, 290, 291, 292, 293, 294, 295, 296, 297, 298, 299, 300, 301, 312, or 313, a variant, derivative, orthologue, paralogue or homologue thereof, in which:

[0722] the amino acid at Mutated site 4 is His, and the amino acid at Mutated site 5 is Thr.

[0723] In another preferred embodiment, the mutated PPO comprises a sequence of SEQ ID NO: 1, 2, 3, 4, 5, 6, 7, 8, 9, 10, 11, 12, 13, 14, 15, 16, 17, 18, 19, 20, 21, 22, 23, 24, 25, 26, 27, 28, 29, 30, 31, 32, 33, 34, 35, 36, 37, 38, 39, 40, 41, 42, 43, 44, 45, 46, 47, 48, 49, 50, 51, 52, 53, 54, 55, 56, 57, 58, 59, 60, 61, 62, 63, 64, 65, 66, 67, 68, 69, 70, 71, 72, 73, 74, 75, 76, 77, 78, 79, 80, 81, 82, 83, 84, 85, 86, 87, 88, 89, 90, 91, 92, 93, 94, 95, 96, 97, 98, 99, 100, 101, 102, 103, 104, 105, 106, 107, 108, 109, 110, 111, 112, 113, 114, 115, 116, 117, 118, 119, 120, 121, 122, 123, 124, 125, 126, 127, 128, 129, 130, 131, 132, 133, 134, 135, 136, 137, 138, 139, 140, 141, 142, 143, 144, 145, 146, 147, 148, 149, 150, 151, 152, 153, 154, 155, 156, 157, 158, 159, 160, 161, 162, 163, 164, 165, 166, 167, 168, 169, 170, 171, 172, 173, 174, 175, 176, 177, 178, 179, 180, 181, 182, 183, 184, 185, 186, 187, 188, 189, 190, 191, 192, 193, 194, 195, 196, 197, 198, 199, 200, 201, 202, 203, 204, 205, 206, 207, 208, 209, 210, 211, 212, 213, 214, 215, 216, 217, 218, 219, 220, 221, 222, 223, 224, 225, 226, 227, 228, 229, 230, 231, 232, 233, 234, 235, 236, 237, 238, 239, 240, 241, 242, 243, 244, 245, 246, 247, 248, 249, 250, 251, 252, 253, 254, 255, 256, 257, 258, 259, 260, 261, 262, 263, 264, 265, 266, 267, 268, 269, 270, 271, 272, 273, 274, 275, 276, 277, 278, 279, 280, 281, 282, 283, 284, 285, 286, 287, 288, 289, 290, 291, 292, 293, 294, 295, 296, 297, 298, 299, 300, 301, 312, or 313, a variant, derivative, orthologue, paralogue or homologue thereof, in which:

[0724] the amino acid at Mutated site 4 is His, and the amino acid at Mutated site 5 is Asn.

[0725] In another preferred embodiment, the mutated PPO comprises a sequence of SEQ ID NO: 1, 2, 3, 4, 5, 6, 7, 8, 9, 10, 11, 12, 13, 14, 15, 16, 17, 18, 19, 20, 21, 22, 23, 24, 25, 26, 27, 28, 29, 30, 31, 32, 33, 34, 35, 36, 37, 38, 39, 40, 41, 42, 43, 44, 45, 46, 47, 48, 49, 50, 51, 52, 53, 54, 55, 56, 57, 58, 59, 60, 61, 62, 63, 64, 65, 66, 67, 68, 69, 70, 71, 72, 73, 74, 75, 76, 77, 78, 79, 80, 81, 82, 83, 84, 85, 86, 87, 88, 89, 90, 91, 92, 93, 94, 95, 96, 97, 98, 99, 100, 101, 102, 103, 104, 105, 106, 107, 108, 109, 110, 111, 112, 113, 114, 115, 116, 117, 118, 119, 120, 121, 122, 123, 124, 125, 126, 127, 128, 129, 130, 131, 132, 133, 134, 135, 136, 137, 138, 139, 140, 141, 142, 143, 144, 145, 146, 147, 148, 149, 150, 151, 152, 153, 154, 155, 156, 157, 158, 159, 160, 161, 162, 163, 164, 165, 166, 167, 168, 169, 170, 171, 172, 173, 174, 175, 176, 177, 178, 179, 180, 181, 182, 183, 184, 185, 186, 187, 188, 189, 190, 191, 192, 193, 194, 195, 196, 197, 198, 199, 200, 201, 202, 203, 204, 205, 206, 207, 208, 209, 210, 211, 212, 213, 214, 215, 216, 217, 218, 219, 220, 221, 222, 223, 224, 225, 226, 227, 228, 229, 230, 231, 232, 233, 234, 235, 236, 237, 238, 239, 240, 241, 242, 243, 244, 245, 246, 247, 248, 249, 250, 251, 252, 253, 254, 255, 256, 257, 258, 259, 260, 261, 262, 263, 264, 265, 266, 267, 268, 269, 270, 271, 272, 273, 274, 275, 276, 277, 278, 279, 280, 281, 282, 283, 284, 285, 286, 287, 288, 289, 290, 291, 292, 293, 294, 295, 296, 297, 298, 299, 300, 301, 312, or 313, a variant, derivative, orthologue, paralogue or homologue thereof, in which:

[0726] the amino acid at Mutated site 4 is His, and the amino acid at Mutated site 5 is Gln.

[0727] In another preferred embodiment, the mutated PPO comprises a sequence of SEQ ID NO: 1, 2, 3, 4, 5, 6, 7, 8, 9, 10, 11, 12, 13, 14, 15, 16, 17, 18, 19, 20, 21, 22, 23, 24, 25, 26, 27, 28, 29, 30, 31, 32, 33, 34, 35, 36, 37, 38, 39, 40, 41, 42, 43, 44, 45, 46, 47, 48, 49, 50, 51, 52, 53, 54, 55, 56, 57, 58, 59, 60, 61, 62, 63, 64, 65, 66, 67, 68, 69, 70, 71, 72, 73, 74, 75, 76, 77, 78, 79, 80, 81, 82, 83, 84, 85, 86, 87, 88, 89, 90, 91, 92, 93, 94, 95, 96, 97, 98, 99, 100, 101, 102, 103, 104, 105, 106, 107, 108, 109, 110, 111, 112, 113, 114, 115, 116, 117, 118, 119, 120, 121, 122, 123, 124, 125, 126, 127, 128, 129, 130, 131, 132, 133, 134, 135, 136, 137, 138, 139, 140, 141, 142, 143, 144, 145, 146, 147, 148, 149, 150, 151, 152, 153, 154, 155, 156, 157, 158, 159, 160, 161, 162, 163, 164, 165, 166, 167, 168, 169, 170, 171, 172, 173, 174, 175, 176, 177, 178, 179, 180, 181, 182, 183, 184, 185, 186, 187, 188, 189, 190, 191, 192, 193, 194, 195, 196, 197, 198, 199, 200, 201, 202, 203, 204, 205, 206, 207, 208, 209, 210, 211, 212, 213, 214, 215, 216, 217, 218, 219, 220, 221, 222, 223, 224, 225, 226, 227, 228, 229, 230, 231, 232, 233, 234, 235, 236, 237, 238, 239, 240, 241, 242, 243, 244, 245, 246, 247, 248, 249, 250, 251, 252, 253, 254, 255, 256, 257, 258, 259, 260, 261, 262, 263, 264, 265, 266, 267, 268, 269, 270, 271, 272, 273, 274, 275, 276, 277, 278, 279, 280, 281, 282, 283, 284, 285, 286, 287, 288, 289, 290, 291, 292, 293, 294, 295, 296, 297, 298, 299, 300, 301, 312, or 313, a variant, derivative, orthologue, paralogue or homologue thereof, in which:

[0728] the amino acid at Mutated site 4 is His, and the amino acid at Mutated site 5 is Cys.

[0729] In another preferred embodiment, the mutated PPO comprises a sequence of SEQ ID NO: 1, 2, 3, 4, 5, 6, 7, 8, 9, 10, 11, 12, 13, 14, 15, 16, 17, 18, 19, 20, 21, 22, 23, 24, 25, 26, 27, 28, 29, 30, 31, 32, 33, 34, 35, 36, 37, 38, 39, 40, 41, 42, 43, 44, 45, 46, 47, 48, 49, 50, 51, 52, 53, 54, 55, 56, 57, 58, 59, 60, 61, 62, 63, 64, 65, 66, 67, 68, 69, 70, 71, 72, 73, 74, 75, 76, 77, 78, 79, 80, 81, 82, 83, 84, 85, 86, 87, 88, 89, 90, 91, 92, 93, 94, 95, 96, 97, 98, 99, 100, 101, 102, 103, 104, 105, 106, 107, 108, 109, 110, 111, 112, 113, 114, 115, 116, 117, 118, 119, 120, 121, 122, 123, 124, 125, 126, 127, 128, 129, 130, 131, 132, 133, 134, 135, 136, 137, 138, 139, 140, 141, 142, 143, 144, 145, 146, 147, 148, 149, 150, 151, 152, 153, 154, 155, 156, 157, 158, 159, 160, 161, 162, 163, 164, 165, 166, 167, 168, 169, 170, 171, 172, 173, 174, 175, 176, 177, 178, 179, 180, 181, 182, 183, 184, 185, 186, 187, 188, 189, 190, 191, 192, 193, 194, 195, 196, 197, 198, 199, 200, 201, 202, 203, 204, 205, 206, 207, 208, 209, 210, 211, 212, 213, 214, 215, 216, 217, 218, 219, 220, 221, 222, 223, 224, 225, 226, 227, 228, 229, 230, 231, 232, 233, 234, 235, 236, 237, 238, 239, 240, 241, 242, 243, 244, 245, 246, 247, 248, 249, 250, 251, 252, 253, 254, 255, 256, 257, 258, 259, 260, 261, 262, 263, 264, 265, 266, 267, 268, 269, 270, 271, 272, 273, 274, 275, 276, 277, 278, 279, 280, 281, 282, 283, 284, 285, 286, 287, 288, 289, 290, 291, 292, 293, 294, 295, 296, 297, 298, 299, 300, 301, 312, or 313, a variant, derivative, orthologue, paralogue or homologue thereof, in which:

[0730] the amino acid at Mutated site 4 is His, and the amino acid at Mutated site 5 is Gly.

[0731] In another preferred embodiment, the mutated PPO comprises a sequence of SEQ ID NO: 1, 2, 3, 4, 5, 6, 7, 8, 9, 10, 11, 12, 13, 14, 15, 16, 17, 18, 19, 20, 21, 22, 23, 24, 25, 26, 27, 28, 29, 30, 31, 32, 33, 34, 35, 36, 37, 38, 39, 40, 41, 42, 43, 44, 45, 46, 47, 48, 49, 50, 51, 52, 53, 54, 55, 56, 57, 58, 59, 60, 61, 62, 63, 64, 65, 66, 67, 68, 69, 70, 71, 72, 73, 74, 75, 76, 77, 78, 79, 80, 81, 82, 83, 84, 85, 86, 87, 88, 89, 90, 91, 92, 93, 94, 95, 96, 97, 98, 99, 100, 101, 102, 103, 104, 105, 106, 107, 108, 109, 110, 111, 112, 113, 114, 115, 116, 117, 118, 119, 120, 121, 122, 123, 124, 125, 126, 127, 128, 129, 130, 131, 132, 133, 134, 135, 136, 137, 138, 139, 140, 141, 142, 143, 144, 145, 146, 147, 148, 149, 150, 151, 152, 153, 154, 155, 156, 157, 158, 159, 160, 161, 162, 163, 164, 165, 166, 167, 168, 169, 170, 171, 172, 173, 174, 175, 176, 177, 178, 179, 180, 181, 182, 183, 184, 185, 186, 187, 188, 189, 190, 191, 192, 193, 194, 195, 196, 197, 198, 199, 200, 201, 202, 203, 204, 205, 206, 207, 208, 209, 210, 211, 212, 213, 214, 215, 216, 217, 218, 219, 220, 221, 222, 223, 224, 225, 226, 227, 228, 229, 230, 231, 232, 233, 234, 235, 236, 237, 238, 239, 240, 241, 242, 243, 244, 245, 246, 247, 248, 249, 250, 251, 252, 253, 254, 255, 256, 257, 258, 259, 260, 261, 262, 263, 264, 265, 266, 267, 268, 269, 270, 271, 272, 273, 274, 275, 276, 277, 278, 279, 280, 281, 282, 283, 284, 285, 286, 287, 288, 289, 290, 291, 292, 293, 294, 295, 296, 297, 298, 299, 300, 301, 312, or 313, a variant, derivative, orthologue, paralogue or homologue thereof, in which:

[0732] the amino acid at Mutated site 4 is His, and the amino acid at Mutated site 5 is Pro.

[0733] In another preferred embodiment, the mutated PPO comprises a sequence of SEQ ID NO: 1, 2, 3, 4, 5, 6, 7, 8, 9, 10, 11, 12, 13, 14, 15, 16, 17, 18, 19, 20, 21, 22, 23, 24, 25, 26, 27, 28, 29, 30, 31, 32, 33, 34, 35, 36, 37, 38, 39, 40, 41, 42, 43, 44, 45, 46, 47, 48, 49, 50, 51, 52, 53, 54, 55, 56, 57, 58, 59, 60, 61, 62, 63, 64, 65, 66, 67, 68, 69, 70, 71, 72, 73, 74, 75, 76, 77, 78, 79, 80, 81, 82, 83, 84, 85, 86, 87, 88, 89, 90, 91, 92, 93, 94, 95, 96, 97, 98, 99, 100, 101, 102, 103, 104, 105, 106, 107, 108, 109, 110, 111, 112, 113, 114, 115, 116, 117, 118, 119, 120, 121, 122, 123, 124, 125, 126, 127, 128, 129, 130, 131, 132, 133, 134, 135, 136, 137, 138, 139, 140, 141, 142, 143, 144, 145, 146, 147, 148, 149, 150, 151, 152, 153, 154, 155, 156, 157, 158, 159, 160, 161, 162, 163, 164, 165, 166, 167, 168, 169, 170, 171, 172, 173, 174, 175, 176, 177, 178, 179, 180, 181, 182, 183, 184, 185, 186, 187, 188, 189, 190, 191, 192, 193, 194, 195, 196, 197, 198, 199, 200, 201, 202, 203, 204, 205, 206, 207, 208, 209, 210, 211, 212, 213, 214, 215, 216, 217, 218, 219, 220, 221, 222, 223, 224, 225, 226, 227, 228, 229, 230, 231, 232, 233, 234, 235, 236, 237, 238, 239, 240, 241, 242, 243, 244, 245, 246, 247, 248, 249, 250, 251, 252, 253, 254, 255, 256, 257, 258, 259, 260, 261, 262, 263, 264, 265, 266, 267, 268, 269, 270, 271, 272, 273, 274, 275, 276, 277, 278, 279, 280, 281, 282, 283, 284, 285, 286, 287, 288, 289, 290, 291, 292, 293, 294, 295, 296, 297, 298, 299, 300, 301, 312, or 313, a variant, derivative, orthologue, paralogue or homologue thereof, in which:

[0734] the amino acid at Mutated site 4 is His, and the amino acid at Mutated site 5 is Arg.

[0735] In another preferred embodiment, the mutated PPO comprises a sequence of SEQ ID NO: 1, 2, 3, 4, 5, 6, 7, 8, 9, 10, 11, 12, 13, 14, 15, 16, 17, 18, 19, 20, 21, 22, 23, 24, 25, 26, 27, 28, 29, 30, 31, 32, 33, 34, 35, 36, 37, 38, 39, 40, 41, 42, 43, 44, 45, 46, 47, 48, 49, 50, 51, 52, 53, 54, 55, 56, 57, 58, 59, 60, 61, 62, 63, 64, 65, 66, 67, 68, 69, 70, 71, 72, 73, 74, 75, 76, 77, 78, 79, 80, 81, 82, 83, 84, 85, 86, 87, 88, 89, 90, 91, 92, 93, 94, 95, 96, 97, 98, 99, 100, 101, 102, 103, 104, 105, 106, 107, 108, 109, 110, 111, 112, 113, 114, 115, 116, 117, 118, 119, 120, 121, 122, 123, 124, 125, 126, 127, 128, 129, 130, 131, 132, 133, 134, 135, 136, 137, 138, 139, 140, 141, 142, 143, 144, 145, 146, 147, 148, 149, 150, 151, 152, 153, 154, 155, 156, 157, 158, 159, 160, 161, 162, 163, 164, 165, 166, 167, 168, 169, 170, 171, 172, 173, 174, 175, 176, 177, 178, 179, 180, 181, 182, 183, 184, 185, 186, 187, 188, 189, 190, 191, 192, 193, 194, 195, 196, 197, 198, 199, 200, 201, 202, 203, 204, 205, 206, 207, 208, 209, 210, 211, 212, 213, 214, 215, 216, 217, 218, 219, 220, 221, 222, 223, 224, 225, 226, 227, 228, 229, 230, 231, 232, 233, 234, 235, 236, 237, 238, 239, 240, 241, 242, 243, 244, 245, 246, 247, 248, 249, 250, 251, 252, 253, 254, 255, 256, 257, 258, 259, 260, 261, 262, 263, 264, 265, 266, 267, 268, 269, 270, 271, 272, 273, 274, 275, 276, 277, 278, 279, 280, 281, 282, 283, 284, 285, 286, 287, 288, 289, 290, 291, 292, 293, 294, 295, 296, 297, 298, 299, 300, 301, 312, or 313, a variant, derivative, orthologue, paralogue or homologue thereof, in which:

[0736] the amino acid at Mutated site 4 is His, and the amino acid at Mutated site 5 is Tyr.

[0737] In another preferred embodiment, the mutated PPO comprises a sequence of SEQ ID NO: 1, 2, 3, 4, 5, 6, 7, 8, 9, 10, 11, 12, 13, 14, 15, 16, 17, 18, 19, 20, 21, 22, 23, 24, 25, 26, 27, 28, 29, 30, 31, 32, 33, 34, 35, 36, 37, 38, 39, 40, 41, 42, 43, 44, 45, 46, 47, 48, 49, 50, 51, 52, 53, 54, 55, 56, 57, 58, 59, 60, 61, 62, 63, 64, 65, 66, 67, 68, 69, 70, 71, 72, 73, 74, 75, 76, 77, 78, 79, 80, 81, 82, 83, 84, 85, 86, 87, 88, 89, 90, 91, 92, 93, 94, 95, 96, 97, 98, 99, 100, 101, 102, 103, 104, 105, 106, 107, 108, 109, 110, 111, 112, 113, 114, 115, 116, 117, 118, 119, 120, 121, 122, 123, 124, 125, 126, 127, 128, 129, 130, 131, 132, 133, 134, 135, 136, 137, 138, 139, 140, 141, 142, 143, 144, 145, 146, 147, 148, 149, 150, 151, 152, 153, 154, 155, 156, 157, 158, 159, 160, 161, 162, 163, 164, 165, 166, 167, 168, 169, 170, 171, 172, 173, 174, 175, 176, 177, 178, 179, 180, 181, 182, 183, 184, 185, 186, 187, 188, 189, 190, 191, 192, 193, 194, 195, 196, 197, 198, 199, 200, 201, 202, 203, 204, 205, 206, 207, 208, 209, 210, 211, 212, 213, 214, 215, 216, 217, 218, 219, 220, 221, 222, 223, 224, 225, 226, 227, 228, 229, 230, 231, 232, 233, 234, 235, 236, 237, 238, 239, 240, 241, 242, 243, 244, 245, 246, 247, 248, 249, 250, 251, 252, 253, 254, 255, 256, 257, 258, 259, 260, 261, 262, 263, 264, 265, 266, 267, 268, 269, 270, 271, 272, 273, 274, 275, 276, 277, 278, 279, 280, 281, 282, 283, 284, 285, 286, 287, 288, 289, 290, 291, 292, 293, 294, 295, 296, 297, 298, 299, 300, 301, 312, or 313, a variant, derivative, orthologue, paralogue or homologue thereof, in which:

[0738] the amino acid at Mutated site 4 is His, and the amino acid at Mutated site 5 is Trp.

[0739] In another preferred embodiment, the mutated PPO comprises a sequence of SEQ ID NO: 1, 2, 3, 4, 5, 6, 7, 8, 9, 10, 11, 12, 13, 14, 15, 16, 17, 18, 19, 20, 21, 22, 23, 24, 25, 26, 27, 28, 29, 30, 31, 32, 33, 34, 35, 36, 37, 38, 39, 40, 41, 42, 43, 44, 45, 46, 47, 48, 49, 50, 51, 52, 53, 54, 55, 56, 57, 58, 59, 60, 61, 62, 63, 64, 65, 66, 67, 68, 69, 70, 71, 72, 73, 74, 75, 76, 77, 78, 79, 80, 81, 82, 83, 84, 85, 86, 87, 88, 89, 90, 91, 92, 93, 94, 95, 96, 97, 98, 99, 100, 101, 102, 103, 104, 105, 106, 107, 108, 109, 110, 111, 112, 113, 114, 115, 116, 117, 118, 119, 120, 121, 122, 123, 124, 125, 126, 127, 128, 129, 130, 131, 132, 133, 134, 135, 136, 137, 138, 139, 140, 141, 142, 143, 144, 145, 146, 147, 148, 149, 150, 151, 152, 153, 154, 155, 156, 157, 158, 159, 160, 161, 162, 163, 164, 165, 166, 167, 168, 169, 170, 171, 172, 173, 174, 175, 176, 177, 178, 179, 180, 181, 182, 183, 184, 185, 186, 187, 188, 189, 190, 191, 192, 193, 194, 195, 196, 197, 198, 199, 200, 201, 202, 203, 204, 205, 206, 207, 208, 209, 210, 211, 212, 213, 214, 215, 216, 217, 218, 219, 220, 221, 222, 223, 224, 225, 226, 227, 228, 229, 230, 231, 232, 233, 234, 235, 236, 237, 238, 239, 240, 241, 242, 243, 244, 245, 246, 247, 248, 249, 250, 251, 252, 253, 254, 255, 256, 257, 258, 259, 260, 261, 262, 263, 264, 265, 266, 267, 268, 269, 270, 271, 272, 273, 274, 275, 276, 277, 278, 279, 280, 281, 282, 283, 284, 285, 286, 287, 288, 289, 290, 291, 292, 293, 294, 295, 296, 297, 298, 299, 300, 301, 312, or 313, a variant, derivative, orthologue, paralogue or homologue thereof, in which:

[0740] the amino acid at Mutated site 4 is Lys, and the amino acid at Mutated site 5 is Ala.

[0741] In another preferred embodiment, the mutated PPO comprises a sequence of SEQ ID NO: 1, 2, 3, 4, 5, 6, 7, 8, 9, 10, 11, 12, 13, 14, 15, 16, 17, 18, 19, 20, 21, 22, 23, 24, 25, 26, 27, 28, 29, 30, 31, 32, 33, 34, 35, 36, 37, 38, 39, 40, 41, 42, 43, 44, 45, 46, 47, 48, 49, 50, 51, 52, 53, 54, 55, 56, 57, 58, 59, 60, 61, 62, 63, 64, 65, 66, 67, 68, 69, 70, 71, 72, 73, 74, 75, 76, 77, 78, 79, 80, 81, 82, 83, 84, 85, 86, 87, 88, 89, 90, 91, 92, 93, 94, 95, 96, 97, 98, 99, 100, 101, 102, 103, 104, 105, 106, 107, 108, 109, 110, 111, 112, 113, 114, 115, 116, 117, 118, 119, 120, 121, 122, 123, 124, 125, 126, 127, 128, 129, 130, 131, 132, 133, 134, 135, 136, 137, 138, 139, 140, 141, 142, 143, 144, 145, 146, 147, 148, 149, 150, 151, 152, 153, 154, 155, 156, 157, 158, 159, 160, 161, 162, 163, 164, 165, 166, 167, 168, 169, 170, 171, 172, 173, 174, 175, 176, 177, 178, 179, 180, 181, 182, 183, 184, 185, 186, 187, 188, 189, 190, 191, 192, 193, 194, 195, 196, 197, 198, 199, 200, 201, 202, 203, 204, 205, 206, 207, 208, 209, 210, 211, 212, 213, 214, 215, 216, 217, 218, 219, 220, 221, 222, 223, 224, 225, 226, 227, 228, 229, 230, 231, 232, 233, 234, 235, 236, 237, 238, 239, 240, 241, 242, 243, 244, 245, 246, 247, 248, 249, 250, 251, 252, 253, 254, 255, 256, 257, 258, 259, 260, 261, 262, 263, 264, 265, 266, 267, 268, 269, 270, 271, 272, 273, 274, 275, 276, 277, 278, 279, 280, 281, 282, 283, 284, 285, 286, 287, 288, 289, 290, 291, 292, 293, 294, 295, 296, 297, 298, 299, 300, 301, 312, or 313, a variant, derivative, orthologue, paralogue or homologue thereof, in which:

[0742] the amino acid at Mutated site 4 is Lys, and the amino acid at Mutated site 5 is Leu.

[0743] In another preferred embodiment, the mutated PPO comprises a sequence of SEQ ID NO: 1, 2, 3, 4, 5, 6, 7, 8, 9, 10, 11, 12, 13, 14, 15, 16, 17, 18, 19, 20, 21, 22, 23, 24, 25, 26, 27, 28, 29, 30, 31, 32, 33, 34, 35, 36, 37, 38, 39, 40, 41, 42, 43, 44, 45, 46, 47, 48, 49, 50, 51, 52, 53, 54, 55, 56, 57, 58, 59, 60, 61, 62, 63, 64, 65, 66, 67, 68, 69, 70, 71, 72, 73, 74, 75, 76, 77, 78, 79, 80, 81, 82, 83, 84, 85, 86, 87, 88, 89, 90, 91, 92, 93, 94, 95, 96, 97, 98, 99, 100, 101, 102, 103, 104, 105, 106, 107, 108, 109, 110, 111, 112, 113, 114, 115, 116, 117, 118, 119, 120, 121, 122, 123, 124, 125, 126, 127, 128, 129, 130, 131, 132, 133, 134, 135, 136, 137, 138, 139, 140, 141, 142, 143, 144, 145, 146, 147, 148, 149, 150, 151, 152, 153, 154, 155, 156, 157, 158, 159, 160, 161, 162, 163, 164, 165, 166, 167, 168, 169, 170, 171, 172, 173, 174, 175, 176, 177, 178, 179, 180, 181, 182, 183, 184, 185, 186, 187, 188, 189, 190, 191, 192, 193, 194, 195, 196, 197, 198, 199, 200, 201, 202, 203, 204, 205, 206, 207, 208, 209, 210, 211, 212, 213, 214, 215, 216, 217, 218, 219, 220, 221, 222, 223, 224, 225, 226, 227, 228, 229, 230, 231, 232, 233, 234, 235, 236, 237, 238, 239, 240, 241, 242, 243, 244, 245, 246, 247, 248, 249, 250, 251, 252, 253, 254, 255, 256, 257, 258, 259, 260, 261, 262, 263, 264, 265, 266, 267, 268, 269, 270, 271, 272, 273, 274, 275, 276, 277, 278, 279, 280, 281, 282, 283, 284, 285, 286, 287, 288, 289, 290, 291, 292, 293, 294, 295, 296, 297, 298, 299, 300, 301, 312, or 313, a variant, derivative, orthologue, paralogue or homologue thereof, in which:

[0744] the amino acid at Mutated site 4 is Lys, and the amino acid at Mutated site 5 is Val.

[0745] In another preferred embodiment, the mutated PPO comprises a sequence of SEQ ID NO: 1, 2, 3, 4, 5, 6, 7, 8, 9, 10, 11, 12, 13, 14, 15, 16, 17, 18, 19, 20, 21, 22, 23, 24, 25, 26, 27, 28, 29, 30, 31, 32, 33, 34, 35, 36, 37, 38, 39, 40, 41, 42, 43, 44, 45, 46, 47, 48, 49, 50, 51, 52, 53, 54, 55, 56, 57, 58, 59, 60, 61, 62, 63, 64, 65, 66, 67, 68, 69, 70, 71, 72, 73, 74, 75, 76, 77, 78, 79, 80, 81, 82, 83, 84, 85, 86, 87, 88, 89, 90, 91, 92, 93, 94, 95, 96, 97, 98, 99, 100, 101, 102, 103, 104, 105, 106, 107, 108, 109, 110, 111, 112, 113, 114, 115, 116, 117, 118, 119, 120, 121, 122, 123, 124, 125, 126, 127, 128, 129, 130, 131, 132, 133, 134, 135, 136, 137, 138, 139, 140, 141, 142, 143, 144, 145, 146, 147, 148, 149, 150, 151, 152, 153, 154, 155, 156, 157, 158, 159, 160, 161, 162, 163, 164, 165, 166, 167, 168, 169, 170, 171, 172, 173, 174, 175, 176, 177, 178, 179, 180, 181, 182, 183, 184, 185, 186, 187, 188, 189, 190, 191, 192, 193, 194, 195, 196, 197, 198, 199, 200, 201, 202, 203, 204, 205, 206, 207, 208, 209, 210, 211, 212, 213, 214, 215, 216, 217, 218, 219, 220, 221, 222, 223, 224, 225, 226, 227, 228, 229, 230, 231, 232, 233, 234, 235, 236, 237, 238, 239, 240, 241, 242, 243, 244, 245, 246, 247, 248, 249, 250, 251, 252, 253, 254, 255, 256, 257, 258, 259, 260, 261, 262, 263, 264, 265, 266, 267, 268, 269, 270, 271, 272, 273, 274, 275, 276, 277, 278, 279, 280, 281, 282, 283, 284, 285, 286, 287, 288, 289, 290, 291, 292, 293, 294, 295, 296, 297, 298, 299, 300, 301, 312, or 313, a variant, derivative, orthologue, paralogue or homologue thereof, in which:

[0746] the amino acid at Mutated site 4 is Lys, and the amino acid at Mutated site 5 is Ile.

[0747] In another preferred embodiment, the mutated PPO comprises a sequence of SEQ ID NO: 1, 2, 3, 4, 5, 6, 7, 8, 9, 10, 11, 12, 13, 14, 15, 16, 17, 18, 19, 20, 21, 22, 23, 24, 25, 26, 27, 28, 29, 30, 31, 32, 33, 34, 35, 36, 37, 38, 39, 40, 41, 42, 43, 44, 45, 46, 47, 48, 49, 50, 51, 52, 53, 54, 55, 56, 57, 58, 59, 60, 61, 62, 63, 64, 65, 66, 67, 68, 69, 70, 71, 72, 73, 74, 75, 76, 77, 78, 79, 80, 81, 82, 83, 84, 85, 86, 87, 88, 89, 90, 91, 92, 93, 94, 95, 96, 97, 98, 99, 100, 101, 102, 103, 104, 105, 106, 107, 108, 109, 110, 111, 112, 113, 114, 115, 116, 117, 118, 119, 120, 121, 122, 123, 124, 125, 126, 127, 128, 129, 130, 131, 132, 133, 134, 135, 136, 137, 138, 139, 140, 141, 142, 143, 144, 145, 146, 147, 148, 149, 150, 151, 152, 153, 154, 155, 156, 157, 158, 159, 160, 161, 162, 163, 164, 165, 166, 167, 168, 169, 170, 171, 172, 173, 174, 175, 176, 177, 178, 179, 180, 181, 182, 183, 184, 185, 186, 187, 188, 189, 190, 191, 192, 193, 194, 195, 196, 197, 198, 199, 200, 201, 202, 203, 204, 205, 206, 207, 208, 209, 210, 211, 212, 213, 214, 215, 216, 217, 218, 219, 220, 221, 222, 223, 224, 225, 226, 227, 228, 229, 230, 231, 232, 233, 234, 235, 236, 237, 238, 239, 240, 241, 242, 243, 244, 245, 246, 247, 248, 249, 250, 251, 252, 253, 254, 255, 256, 257, 258, 259, 260, 261, 262, 263, 264, 265, 266, 267, 268, 269, 270, 271, 272, 273, 274, 275, 276, 277, 278, 279, 280, 281, 282, 283, 284, 285, 286, 287, 288, 289, 290, 291, 292, 293, 294, 295, 296, 297, 298, 299, 300, 301, 312, or 313, a variant, derivative, orthologue, paralogue or homologue thereof, in which:

[0748] the amino acid at Mutated site 4 is Lys, and the amino acid at Mutated site 5 is Met.

[0749] In another preferred embodiment, the mutated PPO comprises a sequence of SEQ ID NO: 1, 2, 3, 4, 5, 6, 7, 8, 9, 10, 11, 12, 13, 14, 15, 16, 17, 18, 19, 20, 21, 22, 23, 24, 25, 26, 27, 28, 29, 30, 31, 32, 33, 34, 35, 36, 37, 38, 39, 40, 41, 42, 43, 44, 45, 46, 47, 48, 49, 50, 51, 52, 53, 54, 55, 56, 57, 58, 59, 60, 61, 62, 63, 64, 65, 66, 67, 68, 69, 70, 71, 72, 73, 74, 75, 76, 77, 78, 79, 80, 81, 82, 83, 84, 85, 86, 87, 88, 89, 90, 91, 92, 93, 94, 95, 96, 97, 98, 99, 100, 101, 102, 103, 104, 105, 106, 107, 108, 109, 110, 111, 112, 113, 114, 115, 116, 117, 118, 119, 120, 121, 122, 123, 124, 125, 126, 127, 128, 129, 130, 131, 132, 133, 134, 135, 136, 137, 138, 139, 140, 141, 142, 143, 144, 145, 146, 147, 148, 149, 150, 151, 152, 153, 154, 155, 156, 157, 158, 159, 160, 161, 162, 163, 164, 165, 166, 167, 168, 169, 170, 171, 172, 173, 174, 175, 176, 177, 178, 179, 180, 181, 182, 183, 184, 185, 186, 187, 188, 189, 190, 191, 192, 193, 194, 195, 196, 197, 198, 199, 200, 201, 202, 203, 204, 205, 206, 207, 208, 209, 210, 211, 212, 213, 214, 215, 216, 217, 218, 219, 220, 221, 222, 223, 224, 225, 226, 227, 228, 229, 230, 231, 232, 233, 234, 235, 236, 237, 238, 239, 240, 241, 242, 243, 244, 245, 246, 247, 248, 249, 250, 251, 252, 253, 254, 255, 256, 257, 258, 259, 260, 261, 262, 263, 264, 265, 266, 267, 268, 269, 270, 271, 272, 273, 274, 275, 276, 277, 278, 279, 280, 281, 282, 283, 284, 285, 286, 287, 288, 289, 290, 291, 292, 293, 294, 295, 296, 297, 298, 299, 300, 301, 312, or 313, a variant, derivative, orthologue, paralogue or homologue thereof, in which:

[0750] the amino acid at Mutated site 4 is Lys, and the amino acid at Mutated site 5 is His.

[0751] In another preferred embodiment, the mutated PPO comprises a sequence of SEQ ID NO: 1, 2, 3, 4, 5, 6, 7, 8, 9, 10, 11, 12, 13, 14, 15, 16, 17, 18, 19, 20, 21, 22, 23, 24, 25, 26, 27, 28, 29, 30, 31, 32, 33, 34, 35, 36, 37, 38, 39, 40, 41, 42, 43, 44, 45, 46, 47, 48, 49, 50, 51, 52, 53, 54, 55, 56, 57, 58, 59, 60, 61, 62, 63, 64, 65, 66, 67, 68, 69, 70, 71, 72, 73, 74, 75, 76, 77, 78, 79, 80, 81, 82, 83, 84, 85, 86, 87, 88, 89, 90, 91, 92, 93, 94, 95, 96, 97, 98, 99, 100, 101, 102, 103, 104, 105, 106, 107, 108, 109, 110, 111, 112, 113, 114, 115, 116, 117, 118, 119, 120, 121, 122, 123, 124, 125, 126, 127, 128, 129, 130, 131, 132, 133, 134, 135, 136, 137, 138, 139, 140, 141, 142, 143, 144, 145, 146, 147, 148, 149, 150, 151, 152, 153, 154, 155, 156, 157, 158, 159, 160, 161, 162, 163, 164, 165, 166, 167, 168, 169, 170, 171, 172, 173, 174, 175, 176, 177, 178, 179, 180, 181, 182, 183, 184, 185, 186, 187, 188, 189, 190, 191, 192, 193, 194, 195, 196, 197, 198, 199, 200, 201, 202, 203, 204, 205, 206, 207, 208, 209, 210, 211, 212, 213, 214, 215, 216, 217, 218, 219, 220, 221, 222, 223, 224, 225, 226, 227, 228, 229, 230, 231, 232, 233, 234, 235, 236, 237, 238, 239, 240, 241, 242, 243, 244, 245, 246, 247, 248, 249, 250, 251, 252, 253, 254, 255, 256, 257, 258, 259, 260, 261, 262, 263, 264, 265, 266, 267, 268, 269, 270, 271, 272, 273, 274, 275, 276, 277, 278, 279, 280, 281, 282, 283, 284, 285, 286, 287, 288, 289, 290, 291, 292, 293, 294, 295, 296, 297, 298, 299, 300, 301, 312, or 313, a variant, derivative, orthologue, paralogue or homologue thereof, in which:

[0752] the amino acid at Mutated site 4 is Lys, and the amino acid at Mutated site 5 is Lys.

[0753] In another preferred embodiment, the mutated PPO comprises a sequence of SEQ ID NO: 1, 2, 3, 4, 5, 6, 7, 8, 9, 10, 11, 12, 13, 14, 15, 16, 17, 18, 19, 20, 21, 22, 23, 24, 25, 26, 27, 28, 29, 30, 31, 32, 33, 34, 35, 36, 37, 38, 39, 40, 41, 42, 43, 44, 45, 46, 47, 48, 49, 50, 51, 52, 53, 54, 55, 56, 57, 58, 59, 60, 61, 62, 63, 64, 65, 66, 67, 68, 69, 70, 71, 72, 73, 74, 75, 76, 77, 78, 79, 80, 81, 82, 83, 84, 85, 86, 87, 88, 89, 90, 91, 92, 93, 94, 95, 96, 97, 98, 99, 100, 101, 102, 103, 104, 105, 106, 107, 108, 109, 110, 111, 112, 113, 114, 115, 116, 117, 118, 119, 120, 121, 122, 123, 124, 125, 126, 127, 128, 129, 130, 131, 132, 133, 134, 135, 136, 137, 138, 139, 140, 141, 142, 143, 144, 145, 146, 147, 148, 149, 150, 151, 152, 153, 154, 155, 156, 157, 158, 159, 160, 161, 162, 163, 164, 165, 166, 167, 168, 169, 170, 171, 172, 173, 174, 175, 176, 177, 178, 179, 180, 181, 182, 183, 184, 185, 186, 187, 188, 189, 190, 191, 192, 193, 194, 195, 196, 197, 198, 199, 200, 201, 202, 203, 204, 205, 206, 207, 208, 209, 210, 211, 212, 213, 214, 215, 216, 217, 218, 219, 220, 221, 222, 223, 224, 225, 226, 227, 228, 229, 230, 231, 232, 233, 234, 235, 236, 237, 238, 239, 240, 241, 242, 243, 244, 245, 246, 247, 248, 249, 250, 251, 252, 253, 254, 255, 256, 257, 258, 259, 260, 261, 262, 263, 264, 265, 266, 267, 268, 269, 270, 271, 272, 273, 274, 275, 276, 277, 278, 279, 280, 281, 282, 283, 284, 285, 286, 287, 288, 289, 290, 291, 292, 293, 294, 295, 296, 297, 298, 299, 300, 301, 312, or 313, a variant, derivative, orthologue, paralogue or homologue thereof, in which:

[0754] the amino acid at Mutated site 4 is Lys, and the amino acid at Mutated site 5 is Asp.

[0755] In another preferred embodiment, the mutated PPO comprises a sequence of SEQ ID NO: 1, 2, 3, 4, 5, 6, 7, 8, 9, 10, 11, 12, 13, 14, 15, 16, 17, 18, 19, 20, 21, 22, 23, 24, 25, 26, 27, 28, 29, 30, 31, 32, 33, 34, 35, 36, 37, 38, 39, 40, 41, 42, 43, 44, 45, 46, 47, 48, 49, 50, 51, 52, 53, 54, 55, 56, 57, 58, 59, 60, 61, 62, 63, 64, 65, 66, 67, 68, 69, 70, 71, 72, 73, 74, 75, 76, 77, 78, 79, 80, 81, 82, 83, 84, 85, 86, 87, 88, 89, 90, 91, 92, 93, 94, 95, 96, 97, 98, 99, 100, 101, 102, 103, 104, 105, 106, 107, 108, 109, 110, 111, 112, 113, 114, 115, 116, 117, 118, 119, 120, 121, 122, 123, 124, 125, 126, 127, 128, 129, 130, 131, 132, 133, 134, 135, 136, 137, 138, 139, 140, 141, 142, 143, 144, 145, 146, 147, 148, 149, 150, 151, 152, 153, 154, 155, 156, 157, 158, 159, 160, 161, 162, 163, 164, 165, 166, 167, 168, 169, 170, 171, 172, 173, 174, 175, 176, 177, 178, 179, 180, 181, 182, 183, 184, 185, 186, 187, 188, 189, 190, 191, 192, 193, 194, 195, 196, 197, 198, 199, 200, 201, 202, 203, 204, 205, 206, 207, 208, 209, 210, 211, 212, 213, 214, 215, 216, 217, 218, 219, 220, 221, 222, 223, 224, 225, 226, 227, 228, 229, 230, 231, 232, 233, 234, 235, 236, 237, 238, 239, 240, 241, 242, 243, 244, 245, 246, 247, 248, 249, 250, 251, 252, 253, 254, 255, 256, 257, 258, 259, 260, 261, 262, 263, 264, 265, 266, 267, 268, 269, 270, 271, 272, 273, 274, 275, 276, 277, 278, 279, 280, 281, 282, 283, 284, 285, 286, 287, 288, 289, 290, 291, 292, 293, 294, 295, 296, 297, 298, 299, 300, 301, 312, or 313, a variant, derivative, orthologue, paralogue or homologue thereof, in which:

[0756] the amino acid at Mutated site 4 is Lys, and the amino acid at Mutated site 5 is Glu.

[0757] In another preferred embodiment, the mutated PPO comprises a sequence of SEQ ID NO: 1, 2, 3, 4, 5, 6, 7, 8, 9, 10, 11, 12, 13, 14, 15, 16, 17, 18, 19, 20, 21, 22, 23, 24, 25, 26, 27, 28, 29, 30, 31, 32, 33, 34, 35, 36, 37, 38, 39, 40, 41, 42, 43, 44, 45, 46, 47, 48, 49, 50, 51, 52, 53, 54, 55, 56, 57, 58, 59, 60, 61, 62, 63, 64, 65, 66, 67, 68, 69, 70, 71, 72, 73, 74, 75, 76, 77, 78, 79, 80, 81, 82, 83, 84, 85, 86, 87, 88, 89, 90, 91, 92, 93, 94, 95, 96, 97, 98, 99, 100, 101, 102, 103, 104, 105, 106, 107, 108, 109, 110, 111, 112, 113, 114, 115, 116, 117, 118, 119, 120, 121, 122, 123, 124, 125, 126, 127, 128, 129, 130, 131, 132, 133, 134, 135, 136, 137, 138, 139, 140, 141, 142, 143, 144, 145, 146, 147, 148, 149, 150, 151, 152, 153, 154, 155, 156, 157, 158, 159, 160, 161, 162, 163, 164, 165, 166, 167, 168, 169, 170, 171, 172, 173, 174, 175, 176, 177, 178, 179, 180, 181, 182, 183, 184, 185, 186, 187, 188, 189, 190, 191, 192, 193, 194, 195, 196, 197, 198, 199, 200, 201, 202, 203, 204, 205, 206, 207, 208, 209, 210, 211, 212, 213, 214, 215, 216, 217, 218, 219, 220, 221, 222, 223, 224, 225, 226, 227, 228, 229, 230, 231, 232, 233, 234, 235, 236, 237, 238, 239, 240, 241, 242, 243, 244, 245, 246, 247, 248, 249, 250, 251, 252, 253, 254, 255, 256, 257, 258, 259, 260, 261, 262, 263, 264, 265, 266, 267, 268, 269, 270, 271, 272, 273, 274, 275, 276, 277, 278, 279, 280, 281, 282, 283, 284, 285, 286, 287, 288, 289, 290, 291, 292, 293, 294, 295, 296, 297, 298, 299, 300, 301, 312, or 313, a variant, derivative, orthologue, paralogue or homologue thereof, in which:

[0758] the amino acid at Mutated site 4 is Lys, and the amino acid at Mutated site 5 is Ser.

[0759] In another preferred embodiment, the mutated PPO comprises a sequence of SEQ ID NO: 1, 2, 3, 4, 5, 6, 7, 8, 9, 10, 11, 12, 13, 14, 15, 16, 17, 18, 19, 20, 21, 22, 23, 24, 25, 26, 27, 28, 29, 30, 31, 32, 33, 34, 35, 36, 37, 38, 39, 40, 41, 42, 43, 44, 45, 46, 47, 48, 49, 50, 51, 52, 53, 54, 55, 56, 57, 58, 59, 60, 61, 62, 63, 64, 65, 66, 67, 68, 69, 70, 71, 72, 73, 74, 75, 76, 77, 78, 79, 80, 81, 82, 83, 84, 85, 86, 87, 88, 89, 90, 91, 92, 93, 94, 95, 96, 97, 98, 99, 100, 101, 102, 103, 104, 105, 106, 107, 108, 109, 110, 111, 112, 113, 114, 115, 116, 117, 118, 119, 120, 121, 122, 123, 124, 125, 126, 127, 128, 129, 130, 131, 132, 133, 134, 135, 136, 137, 138, 139, 140, 141, 142, 143, 144, 145, 146, 147, 148, 149, 150, 151, 152, 153, 154, 155, 156, 157, 158, 159, 160, 161, 162, 163, 164, 165, 166, 167, 168, 169, 170, 171, 172, 173, 174, 175, 176, 177, 178, 179, 180, 181, 182, 183, 184, 185, 186, 187, 188, 189, 190, 191, 192, 193, 194, 195, 196, 197, 198, 199, 200, 201, 202, 203, 204, 205, 206, 207, 208, 209, 210, 211, 212, 213, 214, 215, 216, 217, 218, 219, 220, 221, 222, 223, 224, 225, 226, 227, 228, 229, 230, 231, 232, 233, 234, 235, 236, 237, 238, 239, 240, 241, 242, 243, 244, 245, 246, 247, 248, 249, 250, 251, 252, 253, 254, 255, 256, 257, 258, 259, 260, 261, 262, 263, 264, 265, 266, 267, 268, 269, 270, 271, 272, 273, 274, 275, 276, 277, 278, 279, 280, 281, 282, 283, 284, 285, 286, 287, 288, 289, 290, 291, 292, 293, 294, 295, 296, 297, 298, 299, 300, 301, 312, or 313, a variant, derivative, orthologue, paralogue or homologue thereof, in which:

[0760] the amino acid at Mutated site 4 is Lys, and the amino acid at Mutated site 5 is Thr.

[0761] In another preferred embodiment, the mutated PPO comprises a sequence of SEQ ID NO: 1, 2, 3, 4, 5, 6, 7, 8, 9, 10, 11, 12, 13, 14, 15, 16, 17, 18, 19, 20, 21, 22, 23, 24, 25, 26, 27, 28, 29, 30, 31, 32, 33, 34, 35, 36, 37, 38, 39, 40, 41, 42, 43, 44, 45, 46, 47, 48, 49, 50, 51, 52, 53, 54, 55, 56, 57, 58, 59, 60, 61, 62, 63, 64, 65, 66, 67, 68, 69, 70, 71, 72, 73, 74, 75, 76, 77, 78, 79, 80, 81, 82, 83, 84, 85, 86, 87, 88, 89, 90, 91, 92, 93, 94, 95, 96, 97, 98, 99, 100, 101, 102, 103, 104, 105, 106, 107, 108, 109, 110, 111, 112, 113, 114, 115, 116, 117, 118, 119, 120, 121, 122, 123, 124, 125, 126, 127, 128, 129, 130, 131, 132, 133, 134, 135, 136, 137, 138, 139, 140, 141, 142, 143, 144, 145, 146, 147, 148, 149, 150, 151, 152, 153, 154, 155, 156, 157, 158, 159, 160, 161, 162, 163, 164, 165, 166, 167, 168, 169, 170, 171, 172, 173, 174, 175, 176, 177, 178, 179, 180, 181, 182, 183, 184, 185, 186, 187, 188, 189, 190, 191, 192, 193, 194, 195, 196, 197, 198, 199, 200, 201, 202, 203, 204, 205, 206, 207, 208, 209, 210, 211, 212, 213, 214, 215, 216, 217, 218, 219, 220, 221, 222, 223, 224, 225, 226, 227, 228, 229, 230, 231, 232, 233, 234, 235, 236, 237, 238, 239, 240, 241, 242, 243, 244, 245, 246, 247, 248, 249, 250, 251, 252, 253, 254, 255, 256, 257, 258, 259, 260, 261, 262, 263, 264, 265, 266, 267, 268, 269, 270, 271, 272, 273, 274, 275, 276, 277, 278, 279, 280, 281, 282, 283, 284, 285, 286, 287, 288, 289, 290, 291, 292, 293, 294, 295, 296, 297, 298, 299, 300, 301, 312, or 313, a variant, derivative, orthologue, paralogue or homologue thereof, in which:

[0762] the amino acid at Mutated site 4 is Lys, and the amino acid at Mutated site 5 is Asn.

[0763] In another preferred embodiment, the mutated PPO comprises a sequence of SEQ ID NO: 1, 2, 3, 4, 5, 6, 7, 8, 9, 10, 11, 12, 13, 14, 15, 16, 17, 18, 19, 20, 21, 22, 23, 24, 25, 26, 27, 28, 29, 30, 31, 32, 33, 34, 35, 36, 37, 38, 39, 40, 41, 42, 43, 44, 45, 46, 47, 48, 49, 50, 51, 52, 53, 54, 55, 56, 57, 58, 59, 60, 61, 62, 63, 64, 65, 66, 67, 68, 69, 70, 71, 72, 73, 74, 75, 76, 77, 78, 79, 80, 81, 82, 83, 84, 85, 86, 87, 88, 89, 90, 91, 92, 93, 94, 95, 96, 97, 98, 99, 100, 101, 102, 103, 104, 105, 106, 107, 108, 109, 110, 111, 112, 113, 114, 115, 116, 117, 118, 119, 120, 121, 122, 123, 124, 125, 126, 127, 128, 129, 130, 131, 132, 133, 134, 135, 136, 137, 138, 139, 140, 141, 142, 143, 144, 145, 146, 147, 148, 149, 150, 151, 152, 153, 154, 155, 156, 157, 158, 159, 160, 161, 162, 163, 164, 165, 166, 167, 168, 169, 170, 171, 172, 173, 174, 175, 176, 177, 178, 179, 180, 181, 182, 183, 184, 185, 186, 187, 188, 189, 190, 191, 192, 193, 194, 195, 196, 197, 198, 199, 200, 201, 202, 203, 204, 205, 206, 207, 208, 209, 210, 211, 212, 213, 214, 215, 216, 217, 218, 219, 220, 221, 222, 223, 224, 225, 226, 227, 228, 229, 230, 231, 232, 233, 234, 235, 236, 237, 238, 239, 240, 241, 242, 243, 244, 245, 246, 247, 248, 249, 250, 251, 252, 253, 254, 255, 256, 257, 258, 259, 260, 261, 262, 263, 264, 265, 266, 267, 268, 269, 270, 271, 272, 273, 274, 275, 276, 277, 278, 279, 280, 281, 282, 283, 284, 285, 286, 287, 288, 289, 290, 291, 292, 293, 294, 295, 296, 297, 298, 299, 300, 301, 312, or 313, a variant, derivative, orthologue, paralogue or homologue thereof, in which:

[0764] the amino acid at Mutated site 4 is Lys, and the amino acid at Mutated site 5 is Gln.

[0765] In another preferred embodiment, the mutated PPO comprises a sequence of SEQ ID NO: 1, 2, 3, 4, 5, 6, 7, 8, 9, 10, 11, 12, 13, 14, 15, 16, 17, 18, 19, 20, 21, 22, 23, 24, 25, 26, 27, 28, 29, 30, 31, 32, 33, 34, 35, 36, 37, 38, 39, 40, 41, 42, 43, 44, 45, 46, 47, 48, 49, 50, 51, 52, 53, 54, 55, 56, 57, 58, 59, 60, 61, 62, 63, 64, 65, 66, 67, 68, 69, 70, 71, 72, 73, 74, 75, 76, 77, 78, 79, 80, 81, 82, 83, 84, 85, 86, 87, 88, 89, 90, 91, 92, 93, 94, 95, 96, 97, 98, 99, 100, 101, 102, 103, 104, 105, 106, 107, 108, 109, 110, 111, 112, 113, 114, 115, 116, 117, 118, 119, 120, 121, 122, 123, 124, 125, 126, 127, 128, 129, 130, 131, 132, 133, 134, 135, 136, 137, 138, 139, 140, 141, 142, 143, 144, 145, 146, 147, 148, 149, 150, 151, 152, 153, 154, 155, 156, 157, 158, 159, 160, 161, 162, 163, 164, 165, 166, 167, 168, 169, 170, 171, 172, 173, 174, 175, 176, 177, 178, 179, 180, 181, 182, 183, 184, 185, 186, 187, 188, 189, 190, 191, 192, 193, 194, 195, 196, 197, 198, 199, 200, 201, 202, 203, 204, 205, 206, 207, 208, 209, 210, 211, 212, 213, 214, 215, 216, 217, 218, 219, 220, 221, 222, 223, 224, 225, 226, 227, 228, 229, 230, 231, 232, 233, 234, 235, 236, 237, 238, 239, 240, 241, 242, 243, 244, 245, 246, 247, 248, 249, 250, 251, 252, 253, 254, 255, 256, 257, 258, 259, 260, 261, 262, 263, 264, 265, 266, 267, 268, 269, 270, 271, 272, 273, 274, 275, 276, 277, 278, 279, 280, 281, 282, 283, 284, 285, 286, 287, 288, 289, 290, 291, 292, 293, 294, 295, 296, 297, 298, 299, 300, 301, 312, or 313, a variant, derivative, orthologue, paralogue or homologue thereof, in which:

[0766] the amino acid at Mutated site 4 is Lys, and the amino acid at Mutated site 5 is Cys.

[0767] In another preferred embodiment, the mutated PPO comprises a sequence of SEQ ID NO: 1, 2, 3, 4, 5, 6, 7, 8, 9, 10, 11, 12, 13, 14, 15, 16, 17, 18, 19, 20, 21, 22, 23, 24, 25, 26, 27, 28, 29, 30, 31, 32, 33, 34, 35, 36, 37, 38, 39, 40, 41, 42, 43, 44, 45, 46, 47, 48, 49, 50, 51, 52, 53, 54, 55, 56, 57, 58, 59, 60, 61, 62, 63, 64, 65, 66, 67, 68, 69, 70, 71, 72, 73, 74, 75, 76, 77, 78, 79, 80, 81, 82, 83, 84, 85, 86, 87, 88, 89, 90, 91, 92, 93, 94, 95, 96, 97, 98, 99, 100, 101, 102, 103, 104, 105, 106, 107, 108, 109, 110, 111, 112, 113, 114, 115, 116, 117, 118, 119, 120, 121, 122, 123, 124, 125, 126, 127, 128, 129, 130, 131, 132, 133, 134, 135, 136, 137, 138, 139, 140, 141, 142, 143, 144, 145, 146, 147, 148, 149, 150, 151, 152, 153, 154, 155, 156, 157, 158, 159, 160, 161, 162, 163, 164, 165, 166, 167, 168, 169, 170, 171, 172, 173, 174, 175, 176, 177, 178, 179, 180, 181, 182, 183, 184, 185, 186, 187, 188, 189, 190, 191, 192, 193, 194, 195, 196, 197, 198, 199, 200, 201, 202, 203, 204, 205, 206, 207, 208, 209, 210, 211, 212, 213, 214, 215, 216, 217, 218, 219, 220, 221, 222, 223, 224, 225, 226, 227, 228, 229, 230, 231, 232, 233, 234, 235, 236, 237, 238, 239, 240, 241, 242, 243, 244, 245, 246, 247, 248, 249, 250, 251, 252, 253, 254, 255, 256, 257, 258, 259, 260, 261, 262, 263, 264, 265, 266, 267, 268, 269, 270, 271, 272, 273, 274, 275, 276, 277, 278, 279, 280, 281, 282, 283, 284, 285, 286, 287, 288, 289, 290, 291, 292, 293, 294, 295, 296, 297, 298, 299, 300, 301, 312, or 313, a variant, derivative, orthologue, paralogue or homologue thereof, in which:

[0768] the amino acid at Mutated site 4 is Lys, and the amino acid at Mutated site 5 is Gly.

[0769] In another preferred embodiment, the mutated PPO comprises a sequence of SEQ ID NO: 1, 2, 3, 4, 5, 6, 7, 8, 9, 10, 11, 12, 13, 14, 15, 16, 17, 18, 19, 20, 21, 22, 23, 24, 25, 26, 27, 28, 29, 30, 31, 32, 33, 34, 35, 36, 37, 38, 39, 40, 41, 42, 43, 44, 45, 46, 47, 48, 49, 50, 51, 52, 53, 54, 55, 56, 57, 58, 59, 60, 61, 62, 63, 64, 65, 66, 67, 68, 69, 70, 71, 72, 73, 74, 75, 76, 77, 78, 79, 80, 81, 82, 83, 84, 85, 86, 87, 88, 89, 90, 91, 92, 93, 94, 95, 96, 97, 98, 99, 100, 101, 102, 103, 104, 105, 106, 107, 108, 109, 110, 111, 112, 113, 114, 115, 116, 117, 118, 119, 120, 121, 122, 123, 124, 125, 126, 127, 128, 129, 130, 131, 132, 133, 134, 135, 136, 137, 138, 139, 140, 141, 142, 143, 144, 145, 146, 147, 148, 149, 150, 151, 152, 153, 154, 155, 156, 157, 158, 159, 160, 161, 162, 163, 164, 165, 166, 167, 168, 169, 170, 171, 172, 173, 174, 175, 176, 177, 178, 179, 180, 181, 182, 183, 184, 185, 186, 187, 188, 189, 190, 191, 192, 193, 194, 195, 196, 197, 198, 199, 200, 201, 202, 203, 204, 205, 206, 207, 208, 209, 210, 211, 212, 213, 214, 215, 216, 217, 218, 219, 220, 221, 222, 223, 224, 225, 226, 227, 228, 229, 230, 231, 232, 233, 234, 235, 236, 237, 238, 239, 240, 241, 242, 243, 244, 245, 246, 247, 248, 249, 250, 251, 252, 253, 254, 255, 256, 257, 258, 259, 260, 261, 262, 263, 264, 265, 266, 267, 268, 269, 270, 271, 272, 273, 274, 275, 276, 277, 278, 279, 280, 281, 282, 283, 284, 285, 286, 287, 288, 289, 290, 291, 292, 293, 294, 295, 296, 297, 298, 299, 300, 301, 312, or 313, a variant, derivative, orthologue, paralogue or homologue thereof, in which:

[0770] the amino acid at Mutated site 4 is Lys, and the amino acid at Mutated site 5 is Pro.

[0771] In another preferred embodiment, the mutated PPO comprises a sequence of SEQ ID NO: 1, 2, 3, 4, 5, 6, 7, 8, 9, 10, 11, 12, 13, 14, 15, 16, 17, 18, 19, 20, 21, 22, 23, 24, 25, 26, 27, 28, 29, 30, 31, 32, 33, 34, 35, 36, 37, 38, 39, 40, 41, 42, 43, 44, 45, 46, 47, 48, 49, 50, 51, 52, 53, 54, 55, 56, 57, 58, 59, 60, 61, 62, 63, 64, 65, 66, 67, 68, 69, 70, 71, 72, 73, 74, 75, 76, 77, 78, 79, 80, 81, 82, 83, 84, 85, 86, 87, 88, 89, 90, 91, 92, 93, 94, 95, 96, 97, 98, 99, 100, 101, 102, 103, 104, 105, 106, 107, 108, 109, 110, 111, 112, 113, 114, 115, 116, 117, 118, 119, 120, 121, 122, 123, 124, 125, 126, 127, 128, 129, 130, 131, 132, 133, 134, 135, 136, 137, 138, 139, 140, 141, 142, 143, 144, 145, 146, 147, 148, 149, 150, 151, 152, 153, 154, 155, 156, 157, 158, 159, 160, 161, 162, 163, 164, 165, 166, 167, 168, 169, 170, 171, 172, 173, 174, 175, 176, 177, 178, 179, 180, 181, 182, 183, 184, 185, 186, 187, 188, 189, 190, 191, 192, 193, 194, 195, 196, 197, 198, 199, 200, 201, 202, 203, 204, 205, 206, 207, 208, 209, 210, 211, 212, 213, 214, 215, 216, 217, 218, 219, 220, 221, 222, 223, 224, 225, 226, 227, 228, 229, 230, 231, 232, 233, 234, 235, 236, 237, 238, 239, 240, 241, 242, 243, 244, 245, 246, 247, 248, 249, 250, 251, 252, 253, 254, 255, 256, 257, 258, 259, 260, 261, 262, 263, 264, 265, 266, 267, 268, 269, 270, 271, 272, 273, 274, 275, 276, 277, 278, 279, 280, 281, 282, 283, 284, 285, 286, 287, 288, 289, 290, 291, 292, 293, 294, 295, 296, 297, 298, 299, 300, 301, 312, or 313, a variant, derivative, orthologue, paralogue or homologue thereof, in which:

[0772] the amino acid at Mutated site 4 is Lys, and the amino acid at Mutated site 5 is Arg.

[0773] In another preferred embodiment, the mutated PPO comprises a sequence of SEQ ID NO: 1, 2, 3, 4, 5, 6, 7, 8, 9, 10, 11, 12, 13, 14, 15, 16, 17, 18, 19, 20, 21, 22, 23, 24, 25, 26, 27, 28, 29, 30, 31, 32, 33, 34, 35, 36, 37, 38, 39, 40, 41, 42, 43, 44, 45, 46, 47, 48, 49, 50, 51, 52, 53, 54, 55, 56, 57, 58, 59, 60, 61, 62, 63, 64, 65, 66, 67, 68, 69, 70, 71, 72, 73, 74, 75, 76, 77, 78, 79, 80, 81, 82, 83, 84, 85, 86, 87, 88, 89, 90, 91, 92, 93, 94, 95, 96, 97, 98, 99, 100, 101, 102, 103, 104, 105, 106, 107, 108, 109, 110, 111, 112, 113, 114, 115, 116, 117, 118, 119, 120, 121, 122, 123, 124, 125, 126, 127, 128, 129, 130, 131, 132, 133, 134, 135, 136, 137, 138, 139, 140, 141, 142, 143, 144, 145, 146, 147, 148, 149, 150, 151, 152, 153, 154, 155, 156, 157, 158, 159, 160, 161, 162, 163, 164, 165, 166, 167, 168, 169, 170, 171, 172, 173, 174, 175, 176, 177, 178, 179, 180, 181, 182, 183, 184, 185, 186, 187, 188, 189, 190, 191, 192, 193, 194, 195, 196, 197, 198, 199, 200, 201, 202, 203, 204, 205, 206, 207, 208, 209, 210, 211, 212, 213, 214, 215, 216, 217, 218, 219, 220, 221, 222, 223, 224, 225, 226, 227, 228, 229, 230, 231, 232, 233, 234, 235, 236, 237, 238, 239, 240, 241, 242, 243, 244, 245, 246, 247, 248, 249, 250, 251, 252, 253, 254, 255, 256, 257, 258, 259, 260, 261, 262, 263, 264, 265, 266, 267, 268, 269, 270, 271, 272, 273, 274, 275, 276, 277, 278, 279, 280, 281, 282, 283, 284, 285, 286, 287, 288, 289, 290, 291, 292, 293, 294, 295, 296, 297, 298, 299, 300, 301, 312, or 313, a variant, derivative, orthologue, paralogue or homologue thereof, in which:

[0774] the amino acid at Mutated site 4 is Lys, and the amino acid at Mutated site 5 is Tyr.

[0775] In another preferred embodiment, the mutated PPO comprises a sequence of SEQ ID NO: 1, 2, 3, 4, 5, 6, 7, 8, 9, 10, 11, 12, 13, 14, 15, 16, 17, 18, 19, 20, 21, 22, 23, 24, 25, 26, 27, 28, 29, 30, 31, 32, 33, 34, 35, 36, 37, 38, 39, 40, 41, 42, 43, 44, 45, 46, 47, 48, 49, 50, 51, 52, 53, 54, 55, 56, 57, 58, 59, 60, 61, 62, 63, 64, 65, 66, 67, 68, 69, 70, 71, 72, 73, 74, 75, 76, 77, 78, 79, 80, 81, 82, 83, 84, 85, 86, 87, 88, 89, 90, 91, 92, 93, 94, 95, 96, 97, 98, 99, 100, 101, 102, 103, 104, 105, 106, 107, 108, 109, 110, 111, 112, 113, 114, 115, 116, 117, 118, 119, 120, 121, 122, 123, 124, 125, 126, 127, 128, 129, 130, 131, 132, 133, 134, 135, 136, 137, 138, 139, 140, 141, 142, 143, 144, 145, 146, 147, 148, 149, 150, 151, 152, 153, 154, 155, 156, 157, 158, 159, 160, 161, 162, 163, 164, 165, 166, 167, 168, 169, 170, 171, 172, 173, 174, 175, 176, 177, 178, 179, 180, 181, 182, 183, 184, 185, 186, 187, 188, 189, 190, 191, 192, 193, 194, 195, 196, 197, 198, 199, 200, 201, 202, 203, 204, 205, 206, 207, 208, 209, 210, 211, 212, 213, 214, 215, 216, 217, 218, 219, 220, 221, 222, 223, 224, 225, 226, 227, 228, 229, 230, 231, 232, 233, 234, 235, 236, 237, 238, 239, 240, 241, 242, 243, 244, 245, 246, 247, 248, 249, 250, 251, 252, 253, 254, 255, 256, 257, 258, 259, 260, 261, 262, 263, 264, 265, 266, 267, 268, 269, 270, 271, 272, 273, 274, 275, 276, 277, 278, 279, 280, 281, 282, 283, 284, 285, 286, 287, 288, 289, 290, 291, 292, 293, 294, 295, 296, 297, 298, 299, 300, 301, 312, or 313, a variant, derivative, orthologue, paralogue or homologue thereof, in which:

[0776] the amino acid at Mutated site 4 is Lys, and the amino acid at Mutated site 5 is Trp.

[0777] In another preferred embodiment, the mutated PPO comprises a sequence of SEQ ID NO: 1, 2, 3, 4, 5, 6, 7, 8, 9, 10, 11, 12, 13, 14, 15, 16, 17, 18, 19, 20, 21, 22, 23, 24, 25, 26, 27, 28, 29, 30, 31, 32, 33, 34, 35, 36, 37, 38, 39, 40, 41, 42, 43, 44, 45, 46, 47, 48, 49, 50, 51, 52, 53, 54, 55, 56, 57, 58, 59, 60, 61, 62, 63, 64, 65, 66, 67, 68, 69, 70, 71, 72, 73, 74, 75, 76, 77, 78, 79, 80, 81, 82, 83, 84, 85, 86, 87, 88, 89, 90, 91, 92, 93, 94, 95, 96, 97, 98, 99, 100, 101, 102, 103, 104, 105, 106, 107, 108, 109, 110, 111, 112, 113, 114, 115, 116, 117, 118, 119, 120, 121, 122, 123, 124, 125, 126, 127, 128, 129, 130, 131, 132, 133, 134, 135, 136, 137, 138, 139, 140, 141, 142, 143, 144, 145, 146, 147, 148, 149, 150, 151, 152, 153, 154, 155, 156, 157, 158, 159, 160, 161, 162, 163, 164, 165, 166, 167, 168, 169, 170, 171, 172, 173, 174, 175, 176, 177, 178, 179, 180, 181, 182, 183, 184, 185, 186, 187, 188, 189, 190, 191, 192, 193, 194, 195, 196, 197, 198, 199, 200, 201, 202, 203, 204, 205, 206, 207, 208, 209, 210, 211, 212, 213, 214, 215, 216, 217, 218, 219, 220, 221, 222, 223, 224, 225, 226, 227, 228, 229, 230, 231, 232, 233, 234, 235, 236, 237, 238, 239, 240, 241, 242, 243, 244, 245, 246, 247, 248, 249, 250, 251, 252, 253, 254, 255, 256, 257, 258, 259, 260, 261, 262, 263, 264, 265, 266, 267, 268, 269, 270, 271, 272, 273, 274, 275, 276, 277, 278, 279, 280, 281, 282, 283, 284, 285, 286, 287, 288, 289, 290, 291, 292, 293, 294, 295, 296, 297, 298, 299, 300, 301, 312, or 313, a variant, derivative, orthologue, paralogue or homologue thereof, in which:

[0778] the amino acid at Mutated site 4 is Asp, and the amino acid at Mutated site 5 is Ala.

[0779] In another preferred embodiment, the mutated PPO comprises a sequence of SEQ ID NO: 1, 2, 3, 4, 5, 6, 7, 8, 9, 10, 11, 12, 13, 14, 15, 16, 17, 18, 19, 20, 21, 22, 23, 24, 25, 26, 27, 28, 29, 30, 31, 32, 33, 34, 35, 36, 37, 38, 39, 40, 41, 42, 43, 44, 45, 46, 47, 48, 49, 50, 51, 52, 53, 54, 55, 56, 57, 58, 59, 60, 61, 62, 63, 64, 65, 66, 67, 68, 69, 70, 71, 72, 73, 74, 75, 76, 77, 78, 79, 80, 81, 82, 83, 84, 85, 86, 87, 88, 89, 90, 91, 92, 93, 94, 95, 96, 97, 98, 99, 100, 101, 102, 103, 104, 105, 106, 107, 108, 109, 110, 111, 112, 113, 114, 115, 116, 117, 118, 119, 120, 121, 122, 123, 124, 125, 126, 127, 128, 129, 130, 131, 132, 133, 134, 135, 136, 137, 138, 139, 140, 141, 142, 143, 144, 145, 146, 147, 148, 149, 150, 151, 152, 153, 154, 155, 156, 157, 158, 159, 160, 161, 162, 163, 164, 165, 166, 167, 168, 169, 170, 171, 172, 173, 174, 175, 176, 177, 178, 179, 180, 181, 182, 183, 184, 185, 186, 187, 188, 189, 190, 191, 192, 193, 194, 195, 196, 197, 198, 199, 200, 201, 202, 203, 204, 205, 206, 207, 208, 209, 210, 211, 212, 213, 214, 215, 216, 217, 218, 219, 220, 221, 222, 223, 224, 225, 226, 227, 228, 229, 230, 231, 232, 233, 234, 235, 236, 237, 238, 239, 240, 241, 242, 243, 244, 245, 246, 247, 248, 249, 250, 251, 252, 253, 254, 255, 256, 257, 258, 259, 260, 261, 262, 263, 264, 265, 266, 267, 268, 269, 270, 271, 272, 273, 274, 275, 276, 277, 278, 279, 280, 281, 282, 283, 284, 285, 286, 287, 288, 289, 290, 291, 292, 293, 294, 295, 296, 297, 298, 299, 300, 301, 312, or 313, a variant, derivative, orthologue, paralogue or homologue thereof, in which:

[0780] the amino acid at Mutated site 4 is Asp, and the amino acid at Mutated site 5 is Leu.

[0781] In another preferred embodiment, the mutated PPO comprises a sequence of SEQ ID NO: 1, 2, 3, 4, 5, 6, 7, 8, 9, 10, 11, 12, 13, 14, 15, 16, 17, 18, 19, 20, 21, 22, 23, 24, 25, 26, 27, 28, 29, 30, 31, 32, 33, 34, 35, 36, 37, 38, 39, 40, 41, 42, 43, 44, 45, 46, 47, 48, 49, 50, 51, 52, 53, 54, 55, 56, 57, 58, 59, 60, 61, 62, 63, 64, 65, 66, 67, 68, 69, 70, 71, 72, 73, 74, 75, 76, 77, 78, 79, 80, 81, 82, 83, 84, 85, 86, 87, 88, 89, 90, 91, 92, 93, 94, 95, 96, 97, 98, 99, 100, 101, 102, 103, 104, 105, 106, 107, 108, 109, 110, 111, 112, 113, 114, 115, 116, 117, 118, 119, 120, 121, 122, 123, 124, 125, 126, 127, 128, 129, 130, 131, 132, 133, 134, 135, 136, 137, 138, 139, 140, 141, 142, 143, 144, 145, 146, 147, 148, 149, 150, 151, 152, 153, 154, 155, 156, 157, 158, 159, 160, 161, 162, 163, 164, 165, 166, 167, 168, 169, 170, 171, 172, 173, 174, 175, 176, 177, 178, 179, 180, 181, 182, 183, 184, 185, 186, 187, 188, 189, 190, 191, 192, 193, 194, 195, 196, 197, 198, 199, 200, 201, 202, 203, 204, 205, 206, 207, 208, 209, 210, 211, 212, 213, 214, 215, 216, 217, 218, 219, 220, 221, 222, 223, 224, 225, 226, 227, 228, 229, 230, 231, 232, 233, 234, 235, 236, 237, 238, 239, 240, 241, 242, 243, 244, 245, 246, 247, 248, 249, 250, 251, 252, 253, 254, 255, 256, 257, 258, 259, 260, 261, 262, 263, 264, 265, 266, 267, 268, 269, 270, 271, 272, 273, 274, 275, 276, 277, 278, 279, 280, 281, 282, 283, 284, 285, 286, 287, 288, 289, 290, 291, 292, 293, 294, 295, 296, 297, 298, 299, 300, 301, 312, or 313, a variant, derivative, orthologue, paralogue or homologue thereof, in which:

[0782] the amino acid at Mutated site 4 is Asp, and the amino acid at Mutated site 5 is Val.

[0783] In another preferred embodiment, the mutated PPO comprises a sequence of SEQ ID NO: 1, 2, 3, 4, 5, 6, 7, 8, 9, 10, 11, 12, 13, 14, 15, 16, 17, 18, 19, 20, 21, 22, 23, 24, 25, 26, 27, 28, 29, 30, 31, 32, 33, 34, 35, 36, 37, 38, 39, 40, 41, 42, 43, 44, 45, 46, 47, 48, 49, 50, 51, 52, 53, 54, 55, 56, 57, 58, 59, 60, 61, 62, 63, 64, 65, 66, 67, 68, 69, 70, 71, 72, 73, 74, 75, 76, 77, 78, 79, 80, 81, 82, 83, 84, 85, 86, 87, 88, 89, 90, 91, 92, 93, 94, 95, 96, 97, 98, 99, 100, 101, 102, 103, 104, 105, 106, 107, 108, 109, 110, 111, 112, 113, 114, 115, 116, 117, 118, 119, 120, 121, 122, 123, 124, 125, 126, 127, 128, 129, 130, 131, 132, 133, 134, 135, 136, 137, 138, 139, 140, 141, 142, 143, 144, 145, 146, 147, 148, 149, 150, 151, 152, 153, 154, 155, 156, 157, 158, 159, 160, 161, 162, 163, 164, 165, 166, 167, 168, 169, 170, 171, 172, 173, 174, 175, 176, 177, 178, 179, 180, 181, 182, 183, 184, 185, 186, 187, 188, 189, 190, 191, 192, 193, 194, 195, 196, 197, 198, 199, 200, 201, 202, 203, 204, 205, 206, 207, 208, 209, 210, 211, 212, 213, 214, 215, 216, 217, 218, 219, 220, 221, 222, 223, 224, 225, 226, 227, 228, 229, 230, 231, 232, 233, 234, 235, 236, 237, 238, 239, 240, 241, 242, 243, 244, 245, 246, 247, 248, 249, 250, 251, 252, 253, 254, 255, 256, 257, 258, 259, 260, 261, 262, 263, 264, 265, 266, 267, 268, 269, 270, 271, 272, 273, 274, 275, 276, 277, 278, 279, 280, 281, 282, 283, 284, 285, 286, 287, 288, 289, 290, 291, 292, 293, 294, 295, 296, 297, 298, 299, 300, 301, 312, or 313, a variant, derivative, orthologue, paralogue or homologue thereof, in which:

[0784] the amino acid at Mutated site 4 is Asp, and the amino acid at Mutated site 5 is Ile.

[0785] In another preferred embodiment, the mutated PPO comprises a sequence of SEQ ID NO: 1, 2, 3, 4, 5, 6, 7, 8, 9, 10, 11, 12, 13, 14, 15, 16, 17, 18, 19, 20, 21, 22, 23, 24, 25, 26, 27, 28, 29, 30, 31, 32, 33, 34, 35, 36, 37, 38, 39, 40, 41, 42, 43, 44, 45, 46, 47, 48, 49, 50, 51, 52, 53, 54, 55, 56, 57, 58, 59, 60, 61, 62, 63, 64, 65, 66, 67, 68, 69, 70, 71, 72, 73, 74, 75, 76, 77, 78, 79, 80, 81, 82, 83, 84, 85, 86, 87, 88, 89, 90, 91, 92, 93, 94, 95, 96, 97, 98, 99, 100, 101, 102, 103, 104, 105, 106, 107, 108, 109, 110, 111, 112, 113, 114, 115, 116, 117, 118, 119, 120, 121, 122, 123, 124, 125, 126, 127, 128, 129, 130, 131, 132, 133, 134, 135, 136, 137, 138, 139, 140, 141, 142, 143, 144, 145, 146, 147, 148, 149, 150, 151, 152, 153, 154, 155, 156, 157, 158, 159, 160, 161, 162, 163, 164, 165, 166, 167, 168, 169, 170, 171, 172, 173, 174, 175, 176, 177, 178, 179, 180, 181, 182, 183, 184, 185, 186, 187, 188, 189, 190, 191, 192, 193, 194, 195, 196, 197, 198, 199, 200, 201, 202, 203, 204, 205, 206, 207, 208, 209, 210, 211, 212, 213, 214, 215, 216, 217, 218, 219, 220, 221, 222, 223, 224, 225, 226, 227, 228, 229, 230, 231, 232, 233, 234, 235, 236, 237, 238, 239, 240, 241, 242, 243, 244, 245, 246, 247, 248, 249, 250, 251, 252, 253, 254, 255, 256, 257, 258, 259, 260, 261, 262, 263, 264, 265, 266, 267, 268, 269, 270, 271, 272, 273, 274, 275, 276, 277, 278, 279, 280, 281, 282, 283, 284, 285, 286, 287, 288, 289, 290, 291, 292, 293, 294, 295, 296, 297, 298, 299, 300, 301, 312, or 313, a variant, derivative, orthologue, paralogue or homologue thereof, in which:

[0786] the amino acid at Mutated site 4 is Asp, and the amino acid at Mutated site 5 is Met.

[0787] In another preferred embodiment, the mutated PPO comprises a sequence of SEQ ID NO: 1, 2, 3, 4, 5, 6, 7, 8, 9, 10, 11, 12, 13, 14, 15, 16, 17, 18, 19, 20, 21, 22, 23, 24, 25, 26, 27, 28, 29, 30, 31, 32, 33, 34, 35, 36, 37, 38, 39, 40, 41, 42, 43, 44, 45, 46, 47, 48, 49, 50, 51, 52, 53, 54, 55, 56, 57, 58, 59, 60, 61, 62, 63, 64, 65, 66, 67, 68, 69, 70, 71, 72, 73, 74, 75, 76, 77, 78, 79, 80, 81, 82, 83, 84, 85, 86, 87, 88, 89, 90, 91, 92, 93, 94, 95, 96, 97, 98, 99, 100, 101, 102, 103, 104, 105, 106, 107, 108, 109, 110, 111, 112, 113, 114, 115, 116, 117, 118, 119, 120, 121, 122, 123, 124, 125, 126, 127, 128, 129, 130, 131, 132, 133, 134, 135, 136, 137, 138, 139, 140, 141, 142, 143, 144, 145, 146, 147, 148, 149, 150, 151, 152, 153, 154, 155, 156, 157, 158, 159, 160, 161, 162, 163, 164, 165, 166, 167, 168, 169, 170, 171, 172, 173, 174, 175, 176, 177, 178, 179, 180, 181, 182, 183, 184, 185, 186, 187, 188, 189, 190, 191, 192, 193, 194, 195, 196, 197, 198, 199, 200, 201, 202, 203, 204, 205, 206, 207, 208, 209, 210, 211, 212, 213, 214, 215, 216, 217, 218, 219, 220, 221, 222, 223, 224, 225, 226, 227, 228, 229, 230, 231, 232, 233, 234, 235, 236, 237, 238, 239, 240, 241, 242, 243, 244, 245, 246, 247, 248, 249, 250, 251, 252, 253, 254, 255, 256, 257, 258, 259, 260, 261, 262, 263, 264, 265, 266, 267, 268, 269, 270, 271, 272, 273, 274, 275, 276, 277, 278, 279, 280, 281, 282, 283, 284, 285, 286, 287, 288, 289, 290, 291, 292, 293, 294, 295, 296, 297, 298, 299, 300, 301, 312, or 313, a variant, derivative, orthologue, paralogue or homologue thereof, in which:

[0788] the amino acid at Mutated site 4 is Asp, and the amino acid at Mutated site 5 is His.

[0789] In another preferred embodiment, the mutated PPO comprises a sequence of SEQ ID NO: 1, 2, 3, 4, 5, 6, 7, 8, 9, 10, 11, 12, 13, 14, 15, 16, 17, 18, 19, 20, 21, 22, 23, 24, 25, 26, 27, 28, 29, 30, 31, 32, 33, 34, 35, 36, 37, 38, 39, 40, 41, 42, 43, 44, 45, 46, 47, 48, 49, 50, 51, 52, 53, 54, 55, 56, 57, 58, 59, 60, 61, 62, 63, 64, 65, 66, 67, 68, 69, 70, 71, 72, 73, 74, 75, 76, 77, 78, 79, 80, 81, 82, 83, 84, 85, 86, 87, 88, 89, 90, 91, 92, 93, 94, 95, 96, 97, 98, 99, 100, 101, 102, 103, 104, 105, 106, 107, 108, 109, 110, 111, 112, 113, 114, 115, 116, 117, 118, 119, 120, 121, 122, 123, 124, 125, 126, 127, 128, 129, 130, 131, 132, 133, 134, 135, 136, 137, 138, 139, 140, 141, 142, 143, 144, 145, 146, 147, 148, 149, 150, 151, 152, 153, 154, 155, 156, 157, 158, 159, 160, 161, 162, 163, 164, 165, 166, 167, 168, 169, 170, 171, 172, 173, 174, 175, 176, 177, 178, 179, 180, 181, 182, 183, 184, 185, 186, 187, 188, 189, 190, 191, 192, 193, 194, 195, 196, 197, 198, 199, 200, 201, 202, 203, 204, 205, 206, 207, 208, 209, 210, 211, 212, 213, 214, 215, 216, 217, 218, 219, 220, 221, 222, 223, 224, 225, 226, 227, 228, 229, 230, 231, 232, 233, 234, 235, 236, 237, 238, 239, 240, 241, 242, 243, 244, 245, 246, 247, 248, 249, 250, 251, 252, 253, 254, 255, 256, 257, 258, 259, 260, 261, 262, 263, 264, 265, 266, 267, 268, 269, 270, 271, 272, 273, 274, 275, 276, 277, 278, 279, 280, 281, 282, 283, 284, 285, 286, 287, 288, 289, 290, 291, 292, 293, 294, 295, 296, 297, 298, 299, 300, 301, 312, or 313, a variant, derivative, orthologue, paralogue or homologue thereof, in which:

[0790] the amino acid at Mutated site 4 is Asp, and the amino acid at Mutated site 5 is Lys.

[0791] In another preferred embodiment, the mutated PPO comprises a sequence of SEQ ID NO: 1, 2, 3, 4, 5, 6, 7, 8, 9, 10, 11, 12, 13, 14, 15, 16, 17, 18, 19, 20, 21, 22, 23, 24, 25, 26, 27, 28, 29, 30, 31, 32, 33, 34, 35, 36, 37, 38, 39, 40, 41, 42, 43, 44, 45, 46, 47, 48, 49, 50, 51, 52, 53, 54, 55, 56, 57, 58, 59, 60, 61, 62, 63, 64, 65, 66, 67, 68, 69, 70, 71, 72, 73, 74, 75, 76, 77, 78, 79, 80, 81, 82, 83, 84, 85, 86, 87, 88, 89, 90, 91, 92, 93, 94, 95, 96, 97, 98, 99, 100, 101, 102, 103, 104, 105, 106, 107, 108, 109, 110, 111, 112, 113, 114, 115, 116, 117, 118, 119, 120, 121, 122, 123, 124, 125, 126, 127, 128, 129, 130, 131, 132, 133, 134, 135, 136, 137, 138, 139, 140, 141, 142, 143, 144, 145, 146, 147, 148, 149, 150, 151, 152, 153, 154, 155, 156, 157, 158, 159, 160, 161, 162, 163, 164, 165, 166, 167, 168, 169, 170, 171, 172, 173, 174, 175, 176, 177, 178, 179, 180, 181, 182, 183, 184, 185, 186, 187, 188, 189, 190, 191, 192, 193, 194, 195, 196, 197, 198, 199, 200, 201, 202, 203, 204, 205, 206, 207, 208, 209, 210, 211, 212, 213, 214, 215, 216, 217, 218, 219, 220, 221, 222, 223, 224, 225, 226, 227, 228, 229, 230, 231, 232, 233, 234, 235, 236, 237, 238, 239, 240, 241, 242, 243, 244, 245, 246, 247, 248, 249, 250, 251, 252, 253, 254, 255, 256, 257, 258, 259, 260, 261, 262, 263, 264, 265, 266, 267, 268, 269, 270, 271, 272, 273, 274, 275, 276, 277, 278, 279, 280, 281, 282, 283, 284, 285, 286, 287, 288, 289, 290, 291, 292, 293, 294, 295, 296, 297, 298, 299, 300, 301, 312, or 313, a variant, derivative, orthologue, paralogue or homologue thereof, in which:

[0792] the amino acid at Mutated site 4 is Asp, and the amino acid at Mutated site 5 is Asp.

[0793] In another preferred embodiment, the mutated PPO comprises a sequence of SEQ ID NO: 1, 2, 3, 4, 5, 6, 7, 8, 9, 10, 11, 12, 13, 14, 15, 16, 17, 18, 19, 20, 21, 22, 23, 24, 25, 26, 27, 28, 29, 30, 31, 32, 33, 34, 35, 36, 37, 38, 39, 40, 41, 42, 43, 44, 45, 46, 47, 48, 49, 50, 51, 52, 53, 54, 55, 56, 57, 58, 59, 60, 61, 62, 63, 64, 65, 66, 67, 68, 69, 70, 71, 72, 73, 74, 75, 76, 77, 78, 79, 80, 81, 82, 83, 84, 85, 86, 87, 88, 89, 90, 91, 92, 93, 94, 95, 96, 97, 98, 99, 100, 101, 102, 103, 104, 105, 106, 107, 108, 109, 110, 111, 112, 113, 114, 115, 116, 117, 118, 119, 120, 121, 122, 123, 124, 125, 126, 127, 128, 129, 130, 131, 132, 133, 134, 135, 136, 137, 138, 139, 140, 141, 142, 143, 144, 145, 146, 147, 148, 149, 150, 151, 152, 153, 154, 155, 156, 157, 158, 159, 160, 161, 162, 163, 164, 165, 166, 167, 168, 169, 170, 171, 172, 173, 174, 175, 176, 177, 178, 179, 180, 181, 182, 183, 184, 185, 186, 187, 188, 189, 190, 191, 192, 193, 194, 195, 196, 197, 198, 199, 200, 201, 202, 203, 204, 205, 206, 207, 208, 209, 210, 211, 212, 213, 214, 215, 216, 217, 218, 219, 220, 221, 222, 223, 224, 225, 226, 227, 228, 229, 230, 231, 232, 233, 234, 235, 236, 237, 238, 239, 240, 241, 242, 243, 244, 245, 246, 247, 248, 249, 250, 251, 252, 253, 254, 255, 256, 257, 258, 259, 260, 261, 262, 263, 264, 265, 266, 267, 268, 269, 270, 271, 272, 273, 274, 275, 276, 277, 278, 279, 280, 281, 282, 283, 284, 285, 286, 287, 288, 289, 290, 291, 292, 293, 294, 295, 296, 297, 298, 299, 300, 301, 312, or 313, a variant, derivative, orthologue, paralogue or homologue thereof, in which:

[0794] the amino acid at Mutated site 4 is Asp, and the amino acid at Mutated site 5 is Glu.

[0795] In another preferred embodiment, the mutated PPO comprises a sequence of SEQ ID NO: 1, 2, 3, 4, 5, 6, 7, 8, 9, 10, 11, 12, 13, 14, 15, 16, 17, 18, 19, 20, 21, 22, 23, 24, 25, 26, 27, 28, 29, 30, 31, 32, 33, 34, 35, 36, 37, 38, 39, 40, 41, 42, 43, 44, 45, 46, 47, 48, 49, 50, 51, 52, 53, 54, 55, 56, 57, 58, 59, 60, 61, 62, 63, 64, 65, 66, 67, 68, 69, 70, 71, 72, 73, 74, 75, 76, 77, 78, 79, 80, 81, 82, 83, 84, 85, 86, 87, 88, 89, 90, 91, 92, 93, 94, 95, 96, 97, 98, 99, 100, 101, 102, 103, 104, 105, 106, 107, 108, 109, 110, 111, 112, 113, 114, 115, 116, 117, 118, 119, 120, 121, 122, 123, 124, 125, 126, 127, 128, 129, 130, 131, 132, 133, 134, 135, 136, 137, 138, 139, 140, 141, 142, 143, 144, 145, 146, 147, 148, 149, 150, 151, 152, 153, 154, 155, 156, 157, 158, 159, 160, 161, 162, 163, 164, 165, 166, 167, 168, 169, 170, 171, 172, 173, 174, 175, 176, 177, 178, 179, 180, 181, 182, 183, 184, 185, 186, 187, 188, 189, 190, 191, 192, 193, 194, 195, 196, 197, 198, 199, 200, 201, 202, 203, 204, 205, 206, 207, 208, 209, 210, 211, 212, 213, 214, 215, 216, 217, 218, 219, 220, 221, 222, 223, 224, 225, 226, 227, 228, 229, 230, 231, 232, 233, 234, 235, 236, 237, 238, 239, 240, 241, 242, 243, 244, 245, 246, 247, 248, 249, 250, 251, 252, 253, 254, 255, 256, 257, 258, 259, 260, 261, 262, 263, 264, 265, 266, 267, 268, 269, 270, 271, 272, 273, 274, 275, 276, 277, 278, 279, 280, 281, 282, 283, 284, 285, 286, 287, 288, 289, 290, 291, 292, 293, 294, 295, 296, 297, 298, 299, 300, 301, 312, or 313, a variant, derivative, orthologue, paralogue or homologue thereof, in which:

[0796] the amino acid at Mutated site 4 is Asp, and the amino acid at Mutated site 5 is Ser.

[0797] In another preferred embodiment, the mutated PPO comprises a sequence of SEQ ID NO: 1, 2, 3, 4, 5, 6, 7, 8, 9, 10, 11, 12, 13, 14, 15, 16, 17, 18, 19, 20, 21, 22, 23, 24, 25, 26, 27, 28, 29, 30, 31, 32, 33, 34, 35, 36, 37, 38, 39, 40, 41, 42, 43, 44, 45, 46, 47, 48, 49, 50, 51, 52, 53, 54, 55, 56, 57, 58, 59, 60, 61, 62, 63, 64, 65, 66, 67, 68, 69, 70, 71, 72, 73, 74, 75, 76, 77, 78, 79, 80, 81, 82, 83, 84, 85, 86, 87, 88, 89, 90, 91, 92, 93, 94, 95, 96, 97, 98, 99, 100, 101, 102, 103, 104, 105, 106, 107, 108, 109, 110, 111, 112, 113, 114, 115, 116, 117, 118, 119, 120, 121, 122, 123, 124, 125, 126, 127, 128, 129, 130, 131, 132, 133, 134, 135, 136, 137, 138, 139, 140, 141, 142, 143, 144, 145, 146, 147, 148, 149, 150, 151, 152, 153, 154, 155, 156, 157, 158, 159, 160, 161, 162, 163, 164, 165, 166, 167, 168, 169, 170, 171, 172, 173, 174, 175, 176, 177, 178, 179, 180, 181, 182, 183, 184, 185, 186, 187, 188, 189, 190, 191, 192, 193, 194, 195, 196, 197, 198, 199, 200, 201, 202, 203, 204, 205, 206, 207, 208, 209, 210, 211, 212, 213, 214, 215, 216, 217, 218, 219, 220, 221, 222, 223, 224, 225, 226, 227, 228, 229, 230, 231, 232, 233, 234, 235, 236, 237, 238, 239, 240, 241, 242, 243, 244, 245, 246, 247, 248, 249, 250, 251, 252, 253, 254, 255, 256, 257, 258, 259, 260, 261, 262, 263, 264, 265, 266, 267, 268, 269, 270, 271, 272, 273, 274, 275, 276, 277, 278, 279, 280, 281, 282, 283, 284, 285, 286, 287, 288, 289, 290, 291, 292, 293, 294, 295, 296, 297, 298, 299, 300, 301, 312, or 313, a variant, derivative, orthologue, paralogue or homologue thereof, in which:

[0798] the amino acid at Mutated site 4 is Asp, and the amino acid at Mutated site 5 is Thr.

[0799] In another preferred embodiment, the mutated PPO comprises a sequence of SEQ ID NO: 1, 2, 3, 4, 5, 6, 7, 8, 9, 10, 11, 12, 13, 14, 15, 16, 17, 18, 19, 20, 21, 22, 23, 24, 25, 26, 27, 28, 29, 30, 31, 32, 33, 34, 35, 36, 37, 38, 39, 40, 41, 42, 43, 44, 45, 46, 47, 48, 49, 50, 51, 52, 53, 54, 55, 56, 57, 58, 59, 60, 61, 62, 63, 64, 65, 66, 67, 68, 69, 70, 71, 72, 73, 74, 75, 76, 77, 78, 79, 80, 81, 82, 83, 84, 85, 86, 87, 88, 89, 90, 91, 92, 93, 94, 95, 96, 97, 98, 99, 100, 101, 102, 103, 104, 105, 106, 107, 108, 109, 110, 111, 112, 113, 114, 115, 116, 117, 118, 119, 120, 121, 122, 123, 124, 125, 126, 127, 128, 129, 130, 131, 132, 133, 134, 135, 136, 137, 138, 139, 140, 141, 142, 143, 144, 145, 146, 147, 148, 149, 150, 151, 152, 153, 154, 155, 156, 157, 158, 159, 160, 161, 162, 163, 164, 165, 166, 167, 168, 169, 170, 171, 172, 173, 174, 175, 176, 177, 178, 179, 180, 181, 182, 183, 184, 185, 186, 187, 188, 189, 190, 191, 192, 193, 194, 195, 196, 197, 198, 199, 200, 201, 202, 203, 204, 205, 206, 207, 208, 209, 210, 211, 212, 213, 214, 215, 216, 217, 218, 219, 220, 221, 222, 223, 224, 225, 226, 227, 228, 229, 230, 231, 232, 233, 234, 235, 236, 237, 238, 239, 240, 241, 242, 243, 244, 245, 246, 247, 248, 249, 250, 251, 252, 253, 254, 255, 256, 257, 258, 259, 260, 261, 262, 263, 264, 265, 266, 267, 268, 269, 270, 271, 272, 273, 274, 275, 276, 277, 278, 279, 280, 281, 282, 283, 284, 285, 286, 287, 288, 289, 290, 291, 292, 293, 294, 295, 296, 297, 298, 299, 300, 301, 312, or 313, a variant, derivative, orthologue, paralogue or homologue thereof, in which:

[0800] the amino acid at Mutated site 4 is Asp, and the amino acid at Mutated site 5 is Asn.

[0801] In another preferred embodiment, the mutated PPO comprises a sequence of SEQ ID NO: 1, 2, 3, 4, 5, 6, 7, 8, 9, 10, 11, 12, 13, 14, 15, 16, 17, 18, 19, 20, 21, 22, 23, 24, 25, 26, 27, 28, 29, 30, 31, 32, 33, 34, 35, 36, 37, 38, 39, 40, 41, 42, 43, 44, 45, 46, 47, 48, 49, 50, 51, 52, 53, 54, 55, 56, 57, 58, 59, 60, 61, 62, 63, 64, 65, 66, 67, 68, 69, 70, 71, 72, 73, 74, 75, 76, 77, 78, 79, 80, 81, 82, 83, 84, 85, 86, 87, 88, 89, 90, 91, 92, 93, 94, 95, 96, 97, 98, 99, 100, 101, 102, 103, 104, 105, 106, 107, 108, 109, 110, 111, 112, 113, 114, 115, 116, 117, 118, 119, 120, 121, 122, 123, 124, 125, 126, 127, 128, 129, 130, 131, 132, 133, 134, 135, 136, 137, 138, 139, 140, 141, 142, 143, 144, 145, 146, 147, 148, 149, 150, 151, 152, 153, 154, 155, 156, 157, 158, 159, 160, 161, 162, 163, 164, 165, 166, 167, 168, 169, 170, 171, 172, 173, 174, 175, 176, 177, 178, 179, 180, 181, 182, 183, 184, 185, 186, 187, 188, 189, 190, 191, 192, 193, 194, 195, 196, 197, 198, 199, 200, 201, 202, 203, 204, 205, 206, 207, 208, 209, 210, 211, 212, 213, 214, 215, 216, 217, 218, 219, 220, 221, 222, 223, 224, 225, 226, 227, 228, 229, 230, 231, 232, 233, 234, 235, 236, 237, 238, 239, 240, 241, 242, 243, 244, 245, 246, 247, 248, 249, 250, 251, 252, 253, 254, 255, 256, 257, 258, 259, 260, 261, 262, 263, 264, 265, 266, 267, 268, 269, 270, 271, 272, 273, 274, 275, 276, 277, 278, 279, 280, 281, 282, 283, 284, 285, 286, 287, 288, 289, 290, 291, 292, 293, 294, 295, 296, 297, 298, 299, 300, 301, 312, or 313, a variant, derivative, orthologue, paralogue or homologue thereof, in which:

[0802] the amino acid at Mutated site 4 is Asp, and the amino acid at Mutated site 5 is Gln.

[0803] In another preferred embodiment, the mutated PPO comprises a sequence of SEQ ID NO: 1, 2, 3, 4, 5, 6, 7, 8, 9, 10, 11, 12, 13, 14, 15, 16, 17, 18, 19, 20, 21, 22, 23, 24, 25, 26, 27, 28, 29, 30, 31, 32, 33, 34, 35, 36, 37, 38, 39, 40, 41, 42, 43, 44, 45, 46, 47, 48, 49, 50, 51, 52, 53, 54, 55, 56, 57, 58, 59, 60, 61, 62, 63, 64, 65, 66, 67, 68, 69, 70, 71, 72, 73, 74, 75, 76, 77, 78, 79, 80, 81, 82, 83, 84, 85, 86, 87, 88, 89, 90, 91, 92, 93, 94, 95, 96, 97, 98, 99, 100, 101, 102, 103, 104, 105, 106, 107, 108, 109, 110, 111, 112, 113, 114, 115, 116, 117, 118, 119, 120, 121, 122, 123, 124, 125, 126, 127, 128, 129, 130, 131, 132, 133, 134, 135, 136, 137, 138, 139, 140, 141, 142, 143, 144, 145, 146, 147, 148, 149, 150, 151, 152, 153, 154, 155, 156, 157, 158, 159, 160, 161, 162, 163, 164, 165, 166, 167, 168, 169, 170, 171, 172, 173, 174, 175, 176, 177, 178, 179, 180, 181, 182, 183, 184, 185, 186, 187, 188, 189, 190, 191, 192, 193, 194, 195, 196, 197, 198, 199, 200, 201, 202, 203, 204, 205, 206, 207, 208, 209, 210, 211, 212, 213, 214, 215, 216, 217, 218, 219, 220, 221, 222, 223, 224, 225, 226, 227, 228, 229, 230, 231, 232, 233, 234, 235, 236, 237, 238, 239, 240, 241, 242, 243, 244, 245, 246, 247, 248, 249, 250, 251, 252, 253, 254, 255, 256, 257, 258, 259, 260, 261, 262, 263, 264, 265, 266, 267, 268, 269, 270, 271, 272, 273, 274, 275, 276, 277, 278, 279, 280, 281, 282, 283, 284, 285, 286, 287, 288, 289, 290, 291, 292, 293, 294, 295, 296, 297, 298, 299, 300, 301, 312, or 313, a variant, derivative, orthologue, paralogue or homologue thereof, in which:

[0804] the amino acid at Mutated site 4 is Asp, and the amino acid at Mutated site 5 is Cys.

[0805] In another preferred embodiment, the mutated PPO comprises a sequence of SEQ ID NO: 1, 2, 3, 4, 5, 6, 7, 8, 9, 10, 11, 12, 13, 14, 15, 16, 17, 18, 19, 20, 21, 22, 23, 24, 25, 26, 27, 28, 29, 30, 31, 32, 33, 34, 35, 36, 37, 38, 39, 40, 41, 42, 43, 44, 45, 46, 47, 48, 49, 50, 51, 52, 53, 54, 55, 56, 57, 58, 59, 60, 61, 62, 63, 64, 65, 66, 67, 68, 69, 70, 71, 72, 73, 74, 75, 76, 77, 78, 79, 80, 81, 82, 83, 84, 85, 86, 87, 88, 89, 90, 91, 92, 93, 94, 95, 96, 97, 98, 99, 100, 101, 102, 103, 104, 105, 106, 107, 108, 109, 110, 111, 112, 113, 114, 115, 116, 117, 118, 119, 120, 121, 122, 123, 124, 125, 126, 127, 128, 129, 130, 131, 132, 133, 134, 135, 136, 137, 138, 139, 140, 141, 142, 143, 144, 145, 146, 147, 148, 149, 150, 151, 152, 153, 154, 155, 156, 157, 158, 159, 160, 161, 162, 163, 164, 165, 166, 167, 168, 169, 170, 171, 172, 173, 174, 175, 176, 177, 178, 179, 180, 181, 182, 183, 184, 185, 186, 187, 188, 189, 190, 191, 192, 193, 194, 195, 196, 197, 198, 199, 200, 201, 202, 203, 204, 205, 206, 207, 208, 209, 210, 211, 212, 213, 214, 215, 216, 217, 218, 219, 220, 221, 222, 223, 224, 225, 226, 227, 228, 229, 230, 231, 232, 233, 234, 235, 236, 237, 238, 239, 240, 241, 242, 243, 244, 245, 246, 247, 248, 249, 250, 251, 252, 253, 254, 255, 256, 257, 258, 259, 260, 261, 262, 263, 264, 265, 266, 267, 268, 269, 270, 271, 272, 273, 274, 275, 276, 277, 278, 279, 280, 281, 282, 283, 284, 285, 286, 287, 288, 289, 290, 291, 292, 293, 294, 295, 296, 297, 298, 299, 300, 301, 312, or 313, a variant, derivative, orthologue, paralogue or homologue thereof, in which:

[0806] the amino acid at Mutated site 4 is Asp, and the amino acid at Mutated site 5 is Gly.

[0807] In another preferred embodiment, the mutated PPO comprises a sequence of SEQ ID NO: 1, 2, 3, 4, 5, 6, 7, 8, 9, 10, 11, 12, 13, 14, 15, 16, 17, 18, 19, 20, 21, 22, 23, 24, 25, 26, 27, 28, 29, 30, 31, 32, 33, 34, 35, 36, 37, 38, 39, 40, 41, 42, 43, 44, 45, 46, 47, 48, 49, 50, 51, 52, 53, 54, 55, 56, 57, 58, 59, 60, 61, 62, 63, 64, 65, 66, 67, 68, 69, 70, 71, 72, 73, 74, 75, 76, 77, 78, 79, 80, 81, 82, 83, 84, 85, 86, 87, 88, 89, 90, 91, 92, 93, 94, 95, 96, 97, 98, 99, 100, 101, 102, 103, 104, 105, 106, 107, 108, 109, 110, 111, 112, 113, 114, 115, 116, 117, 118, 119, 120, 121, 122, 123, 124, 125, 126, 127, 128, 129, 130, 131, 132, 133, 134, 135, 136, 137, 138, 139, 140, 141, 142, 143, 144, 145, 146, 147, 148, 149, 150, 151, 152, 153, 154, 155, 156, 157, 158, 159, 160, 161, 162, 163, 164, 165, 166, 167, 168, 169, 170, 171, 172, 173, 174, 175, 176, 177, 178, 179, 180, 181, 182, 183, 184, 185, 186, 187, 188, 189, 190, 191, 192, 193, 194, 195, 196, 197, 198, 199, 200, 201, 202, 203, 204, 205, 206, 207, 208, 209, 210, 211, 212, 213, 214, 215, 216, 217, 218, 219, 220, 221, 222, 223, 224, 225, 226, 227, 228, 229, 230, 231, 232, 233, 234, 235, 236, 237, 238, 239, 240, 241, 242, 243, 244, 245, 246, 247, 248, 249, 250, 251, 252, 253, 254, 255, 256, 257, 258, 259, 260, 261, 262, 263, 264, 265, 266, 267, 268, 269, 270, 271, 272, 273, 274, 275, 276, 277, 278, 279, 280, 281, 282, 283, 284, 285, 286, 287, 288, 289, 290, 291, 292, 293, 294, 295, 296, 297, 298, 299, 300, 301, 312, or 313, a variant, derivative, orthologue, paralogue or homologue thereof, in which:

[0808] the amino acid at Mutated site 4 is Asp, and the amino acid at Mutated site 5 is Pro.

[0809] In another preferred embodiment, the mutated PPO comprises a sequence of SEQ ID NO: 1, 2, 3, 4, 5, 6, 7, 8, 9, 10, 11, 12, 13, 14, 15, 16, 17, 18, 19, 20, 21, 22, 23, 24, 25, 26, 27, 28, 29, 30, 31, 32, 33, 34, 35, 36, 37, 38, 39, 40, 41, 42, 43, 44, 45, 46, 47, 48, 49, 50, 51, 52, 53, 54, 55, 56, 57, 58, 59, 60, 61, 62, 63, 64, 65, 66, 67, 68, 69, 70, 71, 72, 73, 74, 75, 76, 77, 78, 79, 80, 81, 82, 83, 84, 85, 86, 87, 88, 89, 90, 91, 92, 93, 94, 95, 96, 97, 98, 99, 100, 101, 102, 103, 104, 105, 106, 107, 108, 109, 110, 111, 112, 113, 114, 115, 116, 117, 118, 119, 120, 121, 122, 123, 124, 125, 126, 127, 128, 129, 130, 131, 132, 133, 134, 135, 136, 137, 138, 139, 140, 141, 142, 143, 144, 145, 146, 147, 148, 149, 150, 151, 152, 153, 154, 155, 156, 157, 158, 159, 160, 161, 162, 163, 164, 165, 166, 167, 168, 169, 170, 171, 172, 173, 174, 175, 176, 177, 178, 179, 180, 181, 182, 183, 184, 185, 186, 187, 188, 189, 190, 191, 192, 193, 194, 195, 196, 197, 198, 199, 200, 201, 202, 203, 204, 205, 206, 207, 208, 209, 210, 211, 212, 213, 214, 215, 216, 217, 218, 219, 220, 221, 222, 223, 224, 225, 226, 227, 228, 229, 230, 231, 232, 233, 234, 235, 236, 237, 238, 239, 240, 241, 242, 243, 244, 245, 246, 247, 248, 249, 250, 251, 252, 253, 254, 255, 256, 257, 258, 259, 260, 261, 262, 263, 264, 265, 266, 267, 268, 269, 270, 271, 272, 273, 274, 275, 276, 277, 278, 279, 280, 281, 282, 283, 284, 285, 286, 287, 288, 289, 290, 291, 292, 293, 294, 295, 296, 297, 298, 299, 300, 301, 312, or 313, a variant, derivative, orthologue, paralogue or homologue thereof, in which:

[0810] the amino acid at Mutated site 4 is Asp, and the amino acid at Mutated site 5 is Arg.

[0811] In another preferred embodiment, the mutated PPO comprises a sequence of SEQ ID NO: 1, 2, 3, 4, 5, 6, 7, 8, 9, 10, 11, 12, 13, 14, 15, 16, 17, 18, 19, 20, 21, 22, 23, 24, 25, 26, 27, 28, 29, 30, 31, 32, 33, 34, 35, 36, 37, 38, 39, 40, 41, 42, 43, 44, 45, 46, 47, 48, 49, 50, 51, 52, 53, 54, 55, 56, 57, 58, 59, 60, 61, 62, 63, 64, 65, 66, 67, 68, 69, 70, 71, 72, 73, 74, 75, 76, 77, 78, 79, 80, 81, 82, 83, 84, 85, 86, 87, 88, 89, 90, 91, 92, 93, 94, 95, 96, 97, 98, 99, 100, 101, 102, 103, 104, 105, 106, 107, 108, 109, 110, 111, 112, 113, 114, 115, 116, 117, 118, 119, 120, 121, 122, 123, 124, 125, 126, 127, 128, 129, 130, 131, 132, 133, 134, 135, 136, 137, 138, 139, 140, 141, 142, 143, 144, 145, 146, 147, 148, 149, 150, 151, 152, 153, 154, 155, 156, 157, 158, 159, 160, 161, 162, 163, 164, 165, 166, 167, 168, 169, 170, 171, 172, 173, 174, 175, 176, 177, 178, 179, 180, 181, 182, 183, 184, 185, 186, 187, 188, 189, 190, 191, 192, 193, 194, 195, 196, 197, 198, 199, 200, 201, 202, 203, 204, 205, 206, 207, 208, 209, 210, 211, 212, 213, 214, 215, 216, 217, 218, 219, 220, 221, 222, 223, 224, 225, 226, 227, 228, 229, 230, 231, 232, 233, 234, 235, 236, 237, 238, 239, 240, 241, 242, 243, 244, 245, 246, 247, 248, 249, 250, 251, 252, 253, 254, 255, 256, 257, 258, 259, 260, 261, 262, 263, 264, 265, 266, 267, 268, 269, 270, 271, 272, 273, 274, 275, 276, 277, 278, 279, 280, 281, 282, 283, 284, 285, 286, 287, 288, 289, 290, 291, 292, 293, 294, 295, 296, 297, 298, 299, 300, 301, 312, or 313, a variant, derivative, orthologue, paralogue or homologue thereof, in which:

[0812] the amino acid at Mutated site 4 is Asp, and the amino acid at Mutated site 5 is Tyr.

[0813] In another preferred embodiment, the mutated PPO comprises a sequence of SEQ ID NO: 1, 2, 3, 4, 5, 6, 7, 8, 9, 10, 11, 12, 13, 14, 15, 16, 17, 18, 19, 20, 21, 22, 23, 24, 25, 26, 27, 28, 29, 30, 31, 32, 33, 34, 35, 36, 37, 38, 39, 40, 41, 42, 43, 44, 45, 46, 47, 48, 49, 50, 51, 52, 53, 54, 55, 56, 57, 58, 59, 60, 61, 62, 63, 64, 65, 66, 67, 68, 69, 70, 71, 72, 73, 74, 75, 76, 77, 78, 79, 80, 81, 82, 83, 84, 85, 86, 87, 88, 89, 90, 91, 92, 93, 94, 95, 96, 97, 98, 99, 100, 101, 102, 103, 104, 105, 106, 107, 108, 109, 110, 111, 112, 113, 114, 115, 116, 117, 118, 119, 120, 121, 122, 123, 124, 125, 126, 127, 128, 129, 130, 131, 132, 133, 134, 135, 136, 137, 138, 139, 140, 141, 142, 143, 144, 145, 146, 147, 148, 149, 150, 151, 152, 153, 154, 155, 156, 157, 158, 159, 160, 161, 162, 163, 164, 165, 166, 167, 168, 169, 170, 171, 172, 173, 174, 175, 176, 177, 178, 179, 180, 181, 182, 183, 184, 185, 186, 187, 188, 189, 190, 191, 192, 193, 194, 195, 196, 197, 198, 199, 200, 201, 202, 203, 204, 205, 206, 207, 208, 209, 210, 211, 212, 213, 214, 215, 216, 217, 218, 219, 220, 221, 222, 223, 224, 225, 226, 227, 228, 229, 230, 231, 232, 233, 234, 235, 236, 237, 238, 239, 240, 241, 242, 243, 244, 245, 246, 247, 248, 249, 250, 251, 252, 253, 254, 255, 256, 257, 258, 259, 260, 261, 262, 263, 264, 265, 266, 267, 268, 269, 270, 271, 272, 273, 274, 275, 276, 277, 278, 279, 280, 281, 282, 283, 284, 285, 286, 287, 288, 289, 290, 291, 292, 293, 294, 295, 296, 297, 298, 299, 300, 301, 312, or 313, a variant, derivative, orthologue, paralogue or homologue thereof, in which:

[0814] the amino acid at Mutated site 4 is Asp, and the amino acid at Mutated site 5 is Trp.

[0815] In another preferred embodiment, the mutated PPO comprises a sequence of SEQ ID NO: 1, 2, 3, 4, 5, 6, 7, 8, 9, 10, 11, 12, 13, 14, 15, 16, 17, 18, 19, 20, 21, 22, 23, 24, 25, 26, 27, 28, 29, 30, 31, 32, 33, 34, 35, 36, 37, 38, 39, 40, 41, 42, 43, 44, 45, 46, 47, 48, 49, 50, 51, 52, 53, 54, 55, 56, 57, 58, 59, 60, 61, 62, 63, 64, 65, 66, 67, 68, 69, 70, 71, 72, 73, 74, 75, 76, 77, 78, 79, 80, 81, 82, 83, 84, 85, 86, 87, 88, 89, 90, 91, 92, 93, 94, 95, 96, 97, 98, 99, 100, 101, 102, 103, 104, 105, 106, 107, 108, 109, 110, 111, 112, 113, 114, 115, 116, 117, 118, 119, 120, 121, 122, 123, 124, 125, 126, 127, 128, 129, 130, 131, 132, 133, 134, 135, 136, 137, 138, 139, 140, 141, 142, 143, 144, 145, 146, 147, 148, 149, 150, 151, 152, 153, 154, 155, 156, 157, 158, 159, 160, 161, 162, 163, 164, 165, 166, 167, 168, 169, 170, 171, 172, 173, 174, 175, 176, 177, 178, 179, 180, 181, 182, 183, 184, 185, 186, 187, 188, 189, 190, 191, 192, 193, 194, 195, 196, 197, 198, 199, 200, 201, 202, 203, 204, 205, 206, 207, 208, 209, 210, 211, 212, 213, 214, 215, 216, 217, 218, 219, 220, 221, 222, 223, 224, 225, 226, 227, 228, 229, 230, 231, 232, 233, 234, 235, 236, 237, 238, 239, 240, 241, 242, 243, 244, 245, 246, 247, 248, 249, 250, 251, 252, 253, 254, 255, 256, 257, 258, 259, 260, 261, 262, 263, 264, 265, 266, 267, 268, 269, 270, 271, 272, 273, 274, 275, 276, 277, 278, 279, 280, 281, 282, 283, 284, 285, 286, 287, 288, 289, 290, 291, 292, 293, 294, 295, 296, 297, 298, 299, 300, 301, 312, or 313, a variant, derivative, orthologue, paralogue or homologue thereof, in which:

[0816] the amino acid at Mutated site 4 is Glu, and the amino acid at Mutated site 5 is Ala.

[0817] In another preferred embodiment, the mutated PPO comprises a sequence of SEQ ID NO: 1, 2, 3, 4, 5, 6, 7, 8, 9, 10, 11, 12, 13, 14, 15, 16, 17, 18, 19, 20, 21, 22, 23, 24, 25, 26, 27, 28, 29, 30, 31, 32, 33, 34, 35, 36, 37, 38, 39, 40, 41, 42, 43, 44, 45, 46, 47, 48, 49, 50, 51, 52, 53, 54, 55, 56, 57, 58, 59, 60, 61, 62, 63, 64, 65, 66, 67, 68, 69, 70, 71, 72, 73, 74, 75, 76, 77, 78, 79, 80, 81, 82, 83, 84, 85, 86, 87, 88, 89, 90, 91, 92, 93, 94, 95, 96, 97, 98, 99, 100, 101, 102, 103, 104, 105, 106, 107, 108, 109, 110, 111, 112, 113, 114, 115, 116, 117, 118, 119, 120, 121, 122, 123, 124, 125, 126, 127, 128, 129, 130, 131, 132, 133, 134, 135, 136, 137, 138, 139, 140, 141, 142, 143, 144, 145, 146, 147, 148, 149, 150, 151, 152, 153, 154, 155, 156, 157, 158, 159, 160, 161, 162, 163, 164, 165, 166, 167, 168, 169, 170, 171, 172, 173, 174, 175, 176, 177, 178, 179, 180, 181, 182, 183, 184, 185, 186, 187, 188, 189, 190, 191, 192, 193, 194, 195, 196, 197, 198, 199, 200, 201, 202, 203, 204, 205, 206, 207, 208, 209, 210, 211, 212, 213, 214, 215, 216, 217, 218, 219, 220, 221, 222, 223, 224, 225, 226, 227, 228, 229, 230, 231, 232, 233, 234, 235, 236, 237, 238, 239, 240, 241, 242, 243, 244, 245, 246, 247, 248, 249, 250, 251, 252, 253, 254, 255, 256, 257, 258, 259, 260, 261, 262, 263, 264, 265, 266, 267, 268, 269, 270, 271, 272, 273, 274, 275, 276, 277, 278, 279, 280, 281, 282, 283, 284, 285, 286, 287, 288, 289, 290, 291, 292, 293, 294, 295, 296, 297, 298, 299, 300, 301, 312, or 313, a variant, derivative, orthologue, paralogue or homologue thereof, in which:

[0818] the amino acid at Mutated site 4 is Glu, and the amino acid at Mutated site 5 is Leu.

[0819] In another preferred embodiment, the mutated PPO comprises a sequence of SEQ ID NO: 1, 2, 3, 4, 5, 6, 7, 8, 9, 10, 11, 12, 13, 14, 15, 16, 17, 18, 19, 20, 21, 22, 23, 24, 25, 26, 27, 28, 29, 30, 31, 32, 33, 34, 35, 36, 37, 38, 39, 40, 41, 42, 43, 44, 45, 46, 47, 48, 49, 50, 51, 52, 53, 54, 55, 56, 57, 58, 59, 60, 61, 62, 63, 64, 65, 66, 67, 68, 69, 70, 71, 72, 73, 74, 75, 76, 77, 78, 79, 80, 81, 82, 83, 84, 85, 86, 87, 88, 89, 90, 91, 92, 93, 94, 95, 96, 97, 98, 99, 100, 101, 102, 103, 104, 105, 106, 107, 108, 109, 110, 111, 112, 113, 114, 115, 116, 117, 118, 119, 120, 121, 122, 123, 124, 125, 126, 127, 128, 129, 130, 131, 132, 133, 134, 135, 136, 137, 138, 139, 140, 141, 142, 143, 144, 145, 146, 147, 148, 149, 150, 151, 152, 153, 154, 155, 156, 157, 158, 159, 160, 161, 162, 163, 164, 165, 166, 167, 168, 169, 170, 171, 172, 173, 174, 175, 176, 177, 178, 179, 180, 181, 182, 183, 184, 185, 186, 187, 188, 189, 190, 191, 192, 193, 194, 195, 196, 197, 198, 199, 200, 201, 202, 203, 204, 205, 206, 207, 208, 209, 210, 211, 212, 213, 214, 215, 216, 217, 218, 219, 220, 221, 222, 223, 224, 225, 226, 227, 228, 229, 230, 231, 232, 233, 234, 235, 236, 237, 238, 239, 240, 241, 242, 243, 244, 245, 246, 247, 248, 249, 250, 251, 252, 253, 254, 255, 256, 257, 258, 259, 260, 261, 262, 263, 264, 265, 266, 267, 268, 269, 270, 271, 272, 273, 274, 275, 276, 277, 278, 279, 280, 281, 282, 283, 284, 285, 286, 287, 288, 289, 290, 291, 292, 293, 294, 295, 296, 297, 298, 299, 300, 301, 312, or 313, a variant, derivative, orthologue, paralogue or homologue thereof, in which:

[0820] the amino acid at Mutated site 4 is Glu, and the amino acid at Mutated site 5 is Val.

[0821] In another preferred embodiment, the mutated PPO comprises a sequence of SEQ ID NO: 1, 2, 3, 4, 5, 6, 7, 8, 9, 10, 11, 12, 13, 14, 15, 16, 17, 18, 19, 20, 21, 22, 23, 24, 25, 26, 27, 28, 29, 30, 31, 32, 33, 34, 35, 36, 37, 38, 39, 40, 41, 42, 43, 44, 45, 46, 47, 48, 49, 50, 51, 52, 53, 54, 55, 56, 57, 58, 59, 60, 61, 62, 63, 64, 65, 66, 67, 68, 69, 70, 71, 72, 73, 74, 75, 76, 77, 78, 79, 80, 81, 82, 83, 84, 85, 86, 87, 88, 89, 90, 91, 92, 93, 94, 95, 96, 97, 98, 99, 100, 101, 102, 103, 104, 105, 106, 107, 108, 109, 110, 111, 112, 113, 114, 115, 116, 117, 118, 119, 120, 121, 122, 123, 124, 125, 126, 127, 128, 129, 130, 131, 132, 133, 134, 135, 136, 137, 138, 139, 140, 141, 142, 143, 144, 145, 146, 147, 148, 149, 150, 151, 152, 153, 154, 155, 156, 157, 158, 159, 160, 161, 162, 163, 164, 165, 166, 167, 168, 169, 170, 171, 172, 173, 174, 175, 176, 177, 178, 179, 180, 181, 182, 183, 184, 185, 186, 187, 188, 189, 190, 191, 192, 193, 194, 195, 196, 197, 198, 199, 200, 201, 202, 203, 204, 205, 206, 207, 208, 209, 210, 211, 212, 213, 214, 215, 216, 217, 218, 219, 220, 221, 222, 223, 224, 225, 226, 227, 228, 229, 230, 231, 232, 233, 234, 235, 236, 237, 238, 239, 240, 241, 242, 243, 244, 245, 246, 247, 248, 249, 250, 251, 252, 253, 254, 255, 256, 257, 258, 259, 260, 261, 262, 263, 264, 265, 266, 267, 268, 269, 270, 271, 272, 273, 274, 275, 276, 277, 278, 279, 280, 281, 282, 283, 284, 285, 286, 287, 288, 289, 290, 291, 292, 293, 294, 295, 296, 297, 298, 299, 300, 301, 312, or 313, a variant, derivative, orthologue, paralogue or homologue thereof, in which:

[0822] the amino acid at Mutated site 4 is Glu, and the amino acid at Mutated site 5 is Ile.

[0823] In another preferred embodiment, the mutated PPO comprises a sequence of SEQ ID NO: 1, 2, 3, 4, 5, 6, 7, 8, 9, 10, 11, 12, 13, 14, 15, 16, 17, 18, 19, 20, 21, 22, 23, 24, 25, 26, 27, 28, 29, 30, 31, 32, 33, 34, 35, 36, 37, 38, 39, 40, 41, 42, 43, 44, 45, 46, 47, 48, 49, 50, 51, 52, 53, 54, 55, 56, 57, 58, 59, 60, 61, 62, 63, 64, 65, 66, 67, 68, 69, 70, 71, 72, 73, 74, 75, 76, 77, 78, 79, 80, 81, 82, 83, 84, 85, 86, 87, 88, 89, 90, 91, 92, 93, 94, 95, 96, 97, 98, 99, 100, 101, 102, 103, 104, 105, 106, 107, 108, 109, 110, 111, 112, 113, 114, 115, 116, 117, 118, 119, 120, 121, 122, 123, 124, 125, 126, 127, 128, 129, 130, 131, 132, 133, 134, 135, 136, 137, 138, 139, 140, 141, 142, 143, 144, 145, 146, 147, 148, 149, 150, 151, 152, 153, 154, 155, 156, 157, 158, 159, 160, 161, 162, 163, 164, 165, 166, 167, 168, 169, 170, 171, 172, 173, 174, 175, 176, 177, 178, 179, 180, 181, 182, 183, 184, 185, 186, 187, 188, 189, 190, 191, 192, 193, 194, 195, 196, 197, 198, 199, 200, 201, 202, 203, 204, 205, 206, 207, 208, 209, 210, 211, 212, 213, 214, 215, 216, 217, 218, 219, 220, 221, 222, 223, 224, 225, 226, 227, 228, 229, 230, 231, 232, 233, 234, 235, 236, 237, 238, 239, 240, 241, 242, 243, 244, 245, 246, 247, 248, 249, 250, 251, 252, 253, 254, 255, 256, 257, 258, 259, 260, 261, 262, 263, 264, 265, 266, 267, 268, 269, 270, 271, 272, 273, 274, 275, 276, 277, 278, 279, 280, 281, 282, 283, 284, 285, 286, 287, 288, 289, 290, 291, 292, 293, 294, 295, 296, 297, 298, 299, 300, 301, 312, or 313, a variant, derivative, orthologue, paralogue or homologue thereof, in which:

[0824] the amino acid at Mutated site 4 is Glu, and the amino acid at Mutated site 5 is Met.

[0825] In another preferred embodiment, the mutated PPO comprises a sequence of SEQ ID NO: 1, 2, 3, 4, 5, 6, 7, 8, 9, 10, 11, 12, 13, 14, 15, 16, 17, 18, 19, 20, 21, 22, 23, 24, 25, 26, 27, 28, 29, 30, 31, 32, 33, 34, 35, 36, 37, 38, 39, 40, 41, 42, 43, 44, 45, 46, 47, 48, 49, 50, 51, 52, 53, 54, 55, 56, 57, 58, 59, 60, 61, 62, 63, 64, 65, 66, 67, 68, 69, 70, 71, 72, 73, 74, 75, 76, 77, 78, 79, 80, 81, 82, 83, 84, 85, 86, 87, 88, 89, 90, 91, 92, 93, 94, 95, 96, 97, 98, 99, 100, 101, 102, 103, 104, 105, 106, 107, 108, 109, 110, 111, 112, 113, 114, 115, 116, 117, 118, 119, 120, 121, 122, 123, 124, 125, 126, 127, 128, 129, 130, 131, 132, 133, 134, 135, 136, 137, 138, 139, 140, 141, 142, 143, 144, 145, 146, 147, 148, 149, 150, 151, 152, 153, 154, 155, 156, 157, 158, 159, 160, 161, 162, 163, 164, 165, 166, 167, 168, 169, 170, 171, 172, 173, 174, 175, 176, 177, 178, 179, 180, 181, 182, 183, 184, 185, 186, 187, 188, 189, 190, 191, 192, 193, 194, 195, 196, 197, 198, 199, 200, 201, 202, 203, 204, 205, 206, 207, 208, 209, 210, 211, 212, 213, 214, 215, 216, 217, 218, 219, 220, 221, 222, 223, 224, 225, 226, 227, 228, 229, 230, 231, 232, 233, 234, 235, 236, 237, 238, 239, 240, 241, 242, 243, 244, 245, 246, 247, 248, 249, 250, 251, 252, 253, 254, 255, 256, 257, 258, 259, 260, 261, 262, 263, 264, 265, 266, 267, 268, 269, 270, 271, 272, 273, 274, 275, 276, 277, 278, 279, 280, 281, 282, 283, 284, 285, 286, 287, 288, 289, 290, 291, 292, 293, 294, 295, 296, 297, 298, 299, 300, 301, 312, or 313, a variant, derivative, orthologue, paralogue or homologue thereof, in which:

[0826] the amino acid at Mutated site 4 is Glu, and the amino acid at Mutated site 5 is His.

[0827] In another preferred embodiment, the mutated PPO comprises a sequence of SEQ ID NO: 1, 2, 3, 4, 5, 6, 7, 8, 9, 10, 11, 12, 13, 14, 15, 16, 17, 18, 19, 20, 21, 22, 23, 24, 25, 26, 27, 28, 29, 30, 31, 32, 33, 34, 35, 36, 37, 38, 39, 40, 41, 42, 43, 44, 45, 46, 47, 48, 49, 50, 51, 52, 53, 54, 55, 56, 57, 58, 59, 60, 61, 62, 63, 64, 65, 66, 67, 68, 69, 70, 71, 72, 73, 74, 75, 76, 77, 78, 79, 80, 81, 82, 83, 84, 85, 86, 87, 88, 89, 90, 91, 92, 93, 94, 95, 96, 97, 98, 99, 100, 101, 102, 103, 104, 105, 106, 107, 108, 109, 110, 111, 112, 113, 114, 115, 116, 117, 118, 119, 120, 121, 122, 123, 124, 125, 126, 127, 128, 129, 130, 131, 132, 133, 134, 135, 136, 137, 138, 139, 140, 141, 142, 143, 144, 145, 146, 147, 148, 149, 150, 151, 152, 153, 154, 155, 156, 157, 158, 159, 160, 161, 162, 163, 164, 165, 166, 167, 168, 169, 170, 171, 172, 173, 174, 175, 176, 177, 178, 179, 180, 181, 182, 183, 184, 185, 186, 187, 188, 189, 190, 191, 192, 193, 194, 195, 196, 197, 198, 199, 200, 201, 202, 203, 204, 205, 206, 207, 208, 209, 210, 211, 212, 213, 214, 215, 216, 217, 218, 219, 220, 221, 222, 223, 224, 225, 226, 227, 228, 229, 230, 231, 232, 233, 234, 235, 236, 237, 238, 239, 240, 241, 242, 243, 244, 245, 246, 247, 248, 249, 250, 251, 252, 253, 254, 255, 256, 257, 258, 259, 260, 261, 262, 263, 264, 265, 266, 267, 268, 269, 270, 271, 272, 273, 274, 275, 276, 277, 278, 279, 280, 281, 282, 283, 284, 285, 286, 287, 288, 289, 290, 291, 292, 293, 294, 295, 296, 297, 298, 299, 300, 301, 312, or 313, a variant, derivative, orthologue, paralogue or homologue thereof, in which:

[0828] the amino acid at Mutated site 4 is Glu, and the amino acid at Mutated site 5 is Lys.

[0829] In another preferred embodiment, the mutated PPO comprises a sequence of SEQ ID NO: 1, 2, 3, 4, 5, 6, 7, 8, 9, 10, 11, 12, 13, 14, 15, 16, 17, 18, 19, 20, 21, 22, 23, 24, 25, 26, 27, 28, 29, 30, 31, 32, 33, 34, 35, 36, 37, 38, 39, 40, 41, 42, 43, 44, 45, 46, 47, 48, 49, 50, 51, 52, 53, 54, 55, 56, 57, 58, 59, 60, 61, 62, 63, 64, 65, 66, 67, 68, 69, 70, 71, 72, 73, 74, 75, 76, 77, 78, 79, 80, 81, 82, 83, 84, 85, 86, 87, 88, 89, 90, 91, 92, 93, 94, 95, 96, 97, 98, 99, 100, 101, 102, 103, 104, 105, 106, 107, 108, 109, 110, 111, 112, 113, 114, 115, 116, 117, 118, 119, 120, 121, 122, 123, 124, 125, 126, 127, 128, 129, 130, 131, 132, 133, 134, 135, 136, 137, 138, 139, 140, 141, 142, 143, 144, 145, 146, 147, 148, 149, 150, 151, 152, 153, 154, 155, 156, 157, 158, 159, 160, 161, 162, 163, 164, 165, 166, 167, 168, 169, 170, 171, 172, 173, 174, 175, 176, 177, 178, 179, 180, 181, 182, 183, 184, 185, 186, 187, 188, 189, 190, 191, 192, 193, 194, 195, 196, 197, 198, 199, 200, 201, 202, 203, 204, 205, 206, 207, 208, 209, 210, 211, 212, 213, 214, 215, 216, 217, 218, 219, 220, 221, 222, 223, 224, 225, 226, 227, 228, 229, 230, 231, 232, 233, 234, 235, 236, 237, 238, 239, 240, 241, 242, 243, 244, 245, 246, 247, 248, 249, 250, 251, 252, 253, 254, 255, 256, 257, 258, 259, 260, 261, 262, 263, 264, 265, 266, 267, 268, 269, 270, 271, 272, 273, 274, 275, 276, 277, 278, 279, 280, 281, 282, 283, 284, 285, 286, 287, 288, 289, 290, 291, 292, 293, 294, 295, 296, 297, 298, 299, 300, 301, 312, or 313, a variant, derivative, orthologue, paralogue or homologue thereof, in which:

[0830] the amino acid at Mutated site 4 is Glu, and the amino acid at Mutated site 5 is Asp.

[0831] In another preferred embodiment, the mutated PPO comprises a sequence of SEQ ID NO: 1, 2, 3, 4, 5, 6, 7, 8, 9, 10, 11, 12, 13, 14, 15, 16, 17, 18, 19, 20, 21, 22, 23, 24, 25, 26, 27, 28, 29, 30, 31, 32, 33, 34, 35, 36, 37, 38, 39, 40, 41, 42, 43, 44, 45, 46, 47, 48, 49, 50, 51, 52, 53, 54, 55, 56, 57, 58, 59, 60, 61, 62, 63, 64, 65, 66, 67, 68, 69, 70, 71, 72, 73, 74, 75, 76, 77, 78, 79, 80, 81, 82, 83, 84, 85, 86, 87, 88, 89, 90, 91, 92, 93, 94, 95, 96, 97, 98, 99, 100, 101, 102, 103, 104, 105, 106, 107, 108, 109, 110, 111, 112, 113, 114, 115, 116, 117, 118, 119, 120, 121, 122, 123, 124, 125, 126, 127, 128, 129, 130, 131, 132, 133, 134, 135, 136, 137, 138, 139, 140, 141, 142, 143, 144, 145, 146, 147, 148, 149, 150, 151, 152, 153, 154, 155, 156, 157, 158, 159, 160, 161, 162, 163, 164, 165, 166, 167, 168, 169, 170, 171, 172, 173, 174, 175, 176, 177, 178, 179, 180, 181, 182, 183, 184, 185, 186, 187, 188, 189, 190, 191, 192, 193, 194, 195, 196, 197, 198, 199, 200, 201, 202, 203, 204, 205, 206, 207, 208, 209, 210, 211, 212, 213, 214, 215, 216, 217, 218, 219, 220, 221, 222, 223, 224, 225, 226, 227, 228, 229, 230, 231, 232, 233, 234, 235, 236, 237, 238, 239, 240, 241, 242, 243, 244, 245, 246, 247, 248, 249, 250, 251, 252, 253, 254, 255, 256, 257, 258, 259, 260, 261, 262, 263, 264, 265, 266, 267, 268, 269, 270, 271, 272, 273, 274, 275, 276, 277, 278, 279, 280, 281, 282, 283, 284, 285, 286, 287, 288, 289, 290, 291, 292, 293, 294, 295, 296, 297, 298, 299, 300, 301, 312, or 313, a variant, derivative, orthologue, paralogue or homologue thereof, in which:

[0832] the amino acid at Mutated site 4 is Glu, and the amino acid at Mutated site 5 is Glu.

[0833] In another preferred embodiment, the mutated PPO comprises a sequence of SEQ ID NO: 1, 2, 3, 4, 5, 6, 7, 8, 9, 10, 11, 12, 13, 14, 15, 16, 17, 18, 19, 20, 21, 22, 23, 24, 25, 26, 27, 28, 29, 30, 31, 32, 33, 34, 35, 36, 37, 38, 39, 40, 41, 42, 43, 44, 45, 46, 47, 48, 49, 50, 51, 52, 53, 54, 55, 56, 57, 58, 59, 60, 61, 62, 63, 64, 65, 66, 67, 68, 69, 70, 71, 72, 73, 74, 75, 76, 77, 78, 79, 80, 81, 82, 83, 84, 85, 86, 87, 88, 89, 90, 91, 92, 93, 94, 95, 96, 97, 98, 99, 100, 101, 102, 103, 104, 105, 106, 107, 108, 109, 110, 111, 112, 113, 114, 115, 116, 117, 118, 119, 120, 121, 122, 123, 124, 125, 126, 127, 128, 129, 130, 131, 132, 133, 134, 135, 136, 137, 138, 139, 140, 141, 142, 143, 144, 145, 146, 147, 148, 149, 150, 151, 152, 153, 154, 155, 156, 157, 158, 159, 160, 161, 162, 163, 164, 165, 166, 167, 168, 169, 170, 171, 172, 173, 174, 175, 176, 177, 178, 179, 180, 181, 182, 183, 184, 185, 186, 187, 188, 189, 190, 191, 192, 193, 194, 195, 196, 197, 198, 199, 200, 201, 202, 203, 204, 205, 206, 207, 208, 209, 210, 211, 212, 213, 214, 215, 216, 217, 218, 219, 220, 221, 222, 223, 224, 225, 226, 227, 228, 229, 230, 231, 232, 233, 234, 235, 236, 237, 238, 239, 240, 241, 242, 243, 244, 245, 246, 247, 248, 249, 250, 251, 252, 253, 254, 255, 256, 257, 258, 259, 260, 261, 262, 263, 264, 265, 266, 267, 268, 269, 270, 271, 272, 273, 274, 275, 276, 277, 278, 279, 280, 281, 282, 283, 284, 285, 286, 287, 288, 289, 290, 291, 292, 293, 294, 295, 296, 297, 298, 299, 300, 301, 312, or 313, a variant, derivative, orthologue, paralogue or homologue thereof, in which:

[0834] the amino acid at Mutated site 4 is Glu, and the amino acid at Mutated site 5 is Ser.

[0835] In another preferred embodiment, the mutated PPO comprises a sequence of SEQ ID NO: 1, 2, 3, 4, 5, 6, 7, 8, 9, 10, 11, 12, 13, 14, 15, 16, 17, 18, 19, 20, 21, 22, 23, 24, 25, 26, 27, 28, 29, 30, 31, 32, 33, 34, 35, 36, 37, 38, 39, 40, 41, 42, 43, 44, 45, 46, 47, 48, 49, 50, 51, 52, 53, 54, 55, 56, 57, 58, 59, 60, 61, 62, 63, 64, 65, 66, 67, 68, 69, 70, 71, 72, 73, 74, 75, 76, 77, 78, 79, 80, 81, 82, 83, 84, 85, 86, 87, 88, 89, 90, 91, 92, 93, 94, 95, 96, 97, 98, 99, 100, 101, 102, 103, 104, 105, 106, 107, 108, 109, 110, 111, 112, 113, 114, 115, 116, 117, 118, 119, 120, 121, 122, 123, 124, 125, 126, 127, 128, 129, 130, 131, 132, 133, 134, 135, 136, 137, 138, 139, 140, 141, 142, 143, 144, 145, 146, 147, 148, 149, 150, 151, 152, 153, 154, 155, 156, 157, 158, 159, 160, 161, 162, 163, 164, 165, 166, 167, 168, 169, 170, 171, 172, 173, 174, 175, 176, 177, 178, 179, 180, 181, 182, 183, 184, 185, 186, 187, 188, 189, 190, 191, 192, 193, 194, 195, 196, 197, 198, 199, 200, 201, 202, 203, 204, 205, 206, 207, 208, 209, 210, 211, 212, 213, 214, 215, 216, 217, 218, 219, 220, 221, 222, 223, 224, 225, 226, 227, 228, 229, 230, 231, 232, 233, 234, 235, 236, 237, 238, 239, 240, 241, 242, 243, 244, 245, 246, 247, 248, 249, 250, 251, 252, 253, 254, 255, 256, 257, 258, 259, 260, 261, 262, 263, 264, 265, 266, 267, 268, 269, 270, 271, 272, 273, 274, 275, 276, 277, 278, 279, 280, 281, 282, 283, 284, 285, 286, 287, 288, 289, 290, 291, 292, 293, 294, 295, 296, 297, 298, 299, 300, 301, 312, or 313, a variant, derivative, orthologue, paralogue or homologue thereof, in which:

[0836] the amino acid at Mutated site 4 is Glu, and the amino acid at Mutated site 5 is Thr.

[0837] In another preferred embodiment, the mutated PPO comprises a sequence of SEQ ID NO: 1, 2, 3, 4, 5, 6, 7, 8, 9, 10, 11, 12, 13, 14, 15, 16, 17, 18, 19, 20, 21, 22, 23, 24, 25, 26, 27, 28, 29, 30, 31, 32, 33, 34, 35, 36, 37, 38, 39, 40, 41, 42, 43, 44, 45, 46, 47, 48, 49, 50, 51, 52, 53, 54, 55, 56, 57, 58, 59, 60, 61, 62, 63, 64, 65, 66, 67, 68, 69, 70, 71, 72, 73, 74, 75, 76, 77, 78, 79, 80, 81, 82, 83, 84, 85, 86, 87, 88, 89, 90, 91, 92, 93, 94, 95, 96, 97, 98, 99, 100, 101, 102, 103, 104, 105, 106, 107, 108, 109, 110, 111, 112, 113, 114, 115, 116, 117, 118, 119, 120, 121, 122, 123, 124, 125, 126, 127, 128, 129, 130, 131, 132, 133, 134, 135, 136, 137, 138, 139, 140, 141, 142, 143, 144, 145, 146, 147, 148, 149, 150, 151, 152, 153, 154, 155, 156, 157, 158, 159, 160, 161, 162, 163, 164, 165, 166, 167, 168, 169, 170, 171, 172, 173, 174, 175, 176, 177, 178, 179, 180, 181, 182, 183, 184, 185, 186, 187, 188, 189, 190, 191, 192, 193, 194, 195, 196, 197, 198, 199, 200, 201, 202, 203, 204, 205, 206, 207, 208, 209, 210, 211, 212, 213, 214, 215, 216, 217, 218, 219, 220, 221, 222, 223, 224, 225, 226, 227, 228, 229, 230, 231, 232, 233, 234, 235, 236, 237, 238, 239, 240, 241, 242, 243, 244, 245, 246, 247, 248, 249, 250, 251, 252, 253, 254, 255, 256, 257, 258, 259, 260, 261, 262, 263, 264, 265, 266, 267, 268, 269, 270, 271, 272, 273, 274, 275, 276, 277, 278, 279, 280, 281, 282, 283, 284, 285, 286, 287, 288, 289, 290, 291, 292, 293, 294, 295, 296, 297, 298, 299, 300, 301, 312, or 313, a variant, derivative, orthologue, paralogue or homologue thereof, in which:

[0838] the amino acid at Mutated site 4 is Glu, and the amino acid at Mutated site 5 is Asn.

[0839] In another preferred embodiment, the mutated PPO comprises a sequence of SEQ ID NO: 1, 2, 3, 4, 5, 6, 7, 8, 9, 10, 11, 12, 13, 14, 15, 16, 17, 18, 19, 20, 21, 22, 23, 24, 25, 26, 27, 28, 29, 30, 31, 32, 33, 34, 35, 36, 37, 38, 39, 40, 41, 42, 43, 44, 45, 46, 47, 48, 49, 50, 51, 52, 53, 54, 55, 56, 57, 58, 59, 60, 61, 62, 63, 64, 65, 66, 67, 68, 69, 70, 71, 72, 73, 74, 75, 76, 77, 78, 79, 80, 81, 82, 83, 84, 85, 86, 87, 88, 89, 90, 91, 92, 93, 94, 95, 96, 97, 98, 99, 100, 101, 102, 103, 104, 105, 106, 107, 108, 109, 110, 111, 112, 113, 114, 115, 116, 117, 118, 119, 120, 121, 122, 123, 124, 125, 126, 127, 128, 129, 130, 131, 132, 133, 134, 135, 136, 137, 138, 139, 140, 141, 142, 143, 144, 145, 146, 147, 148, 149, 150, 151, 152, 153, 154, 155, 156, 157, 158, 159, 160, 161, 162, 163, 164, 165, 166, 167, 168, 169, 170, 171, 172, 173, 174, 175, 176, 177, 178, 179, 180, 181, 182, 183, 184, 185, 186, 187, 188, 189, 190, 191, 192, 193, 194, 195, 196, 197, 198, 199, 200, 201, 202, 203, 204, 205, 206, 207, 208, 209, 210, 211, 212, 213, 214, 215, 216, 217, 218, 219, 220, 221, 222, 223, 224, 225, 226, 227, 228, 229, 230, 231, 232, 233, 234, 235, 236, 237, 238, 239, 240, 241, 242, 243, 244, 245, 246, 247, 248, 249, 250, 251, 252, 253, 254, 255, 256, 257, 258, 259, 260, 261, 262, 263, 264, 265, 266, 267, 268, 269, 270, 271, 272, 273, 274, 275, 276, 277, 278, 279, 280, 281, 282, 283, 284, 285, 286, 287, 288, 289, 290, 291, 292, 293, 294, 295, 296, 297, 298, 299, 300, 301, 312, or 313, a variant, derivative, orthologue, paralogue or homologue thereof, in which:

[0840] the amino acid at Mutated site 4 is Glu, and the amino acid at Mutated site 5 is Gln.

[0841] In another preferred embodiment, the mutated PPO comprises a sequence of SEQ ID NO: 1, 2, 3, 4, 5, 6, 7, 8, 9, 10, 11, 12, 13, 14, 15, 16, 17, 18, 19, 20, 21, 22, 23, 24, 25, 26, 27, 28, 29, 30, 31, 32, 33, 34, 35, 36, 37, 38, 39, 40, 41, 42, 43, 44, 45, 46, 47, 48, 49, 50, 51, 52, 53, 54, 55, 56, 57, 58, 59, 60, 61, 62, 63, 64, 65, 66, 67, 68, 69, 70, 71, 72, 73, 74, 75, 76, 77, 78, 79, 80, 81, 82, 83, 84, 85, 86, 87, 88, 89, 90, 91, 92, 93, 94, 95, 96, 97, 98, 99, 100, 101, 102, 103, 104, 105, 106, 107, 108, 109, 110, 111, 112, 113, 114, 115, 116, 117, 118, 119, 120, 121, 122, 123, 124, 125, 126, 127, 128, 129, 130, 131, 132, 133, 134, 135, 136, 137, 138, 139, 140, 141, 142, 143, 144, 145, 146, 147, 148, 149, 150, 151, 152, 153, 154, 155, 156, 157, 158, 159, 160, 161, 162, 163, 164, 165, 166, 167, 168, 169, 170, 171, 172, 173, 174, 175, 176, 177, 178, 179, 180, 181, 182, 183, 184, 185, 186, 187, 188, 189, 190, 191, 192, 193, 194, 195, 196, 197, 198, 199, 200, 201, 202, 203, 204, 205, 206, 207, 208, 209, 210, 211, 212, 213, 214, 215, 216, 217, 218, 219, 220, 221, 222, 223, 224, 225, 226, 227, 228, 229, 230, 231, 232, 233, 234, 235, 236, 237, 238, 239, 240, 241, 242, 243, 244, 245, 246, 247, 248, 249, 250, 251, 252, 253, 254, 255, 256, 257, 258, 259, 260, 261, 262, 263, 264, 265, 266, 267, 268, 269, 270, 271, 272, 273, 274, 275, 276, 277, 278, 279, 280, 281, 282, 283, 284, 285, 286, 287, 288, 289, 290, 291, 292, 293, 294, 295, 296, 297, 298, 299, 300, 301, 312, or 313, a variant, derivative, orthologue, paralogue or homologue thereof, in which:

[0842] the amino acid at Mutated site 4 is Glu, and the amino acid at Mutated site 5 is Cys.

[0843] In another preferred embodiment, the mutated PPO comprises a sequence of SEQ ID NO: 1, 2, 3, 4, 5, 6, 7, 8, 9, 10, 11, 12, 13, 14, 15, 16, 17, 18, 19, 20, 21, 22, 23, 24, 25, 26, 27, 28, 29, 30, 31, 32, 33, 34, 35, 36, 37, 38, 39, 40, 41, 42, 43, 44, 45, 46, 47, 48, 49, 50, 51, 52, 53, 54, 55, 56, 57, 58, 59, 60, 61, 62, 63, 64, 65, 66, 67, 68, 69, 70, 71, 72, 73, 74, 75, 76, 77, 78, 79, 80, 81, 82, 83, 84, 85, 86, 87, 88, 89, 90, 91, 92, 93, 94, 95, 96, 97, 98, 99, 100, 101, 102, 103, 104, 105, 106, 107, 108, 109, 110, 111, 112, 113, 114, 115, 116, 117, 118, 119, 120, 121, 122, 123, 124, 125, 126, 127, 128, 129, 130, 131, 132, 133, 134, 135, 136, 137, 138, 139, 140, 141, 142, 143, 144, 145, 146, 147, 148, 149, 150, 151, 152, 153, 154, 155, 156, 157, 158, 159, 160, 161, 162, 163, 164, 165, 166, 167, 168, 169, 170, 171, 172, 173, 174, 175, 176, 177, 178, 179, 180, 181, 182, 183, 184, 185, 186, 187, 188, 189, 190, 191, 192, 193, 194, 195, 196, 197, 198, 199, 200, 201, 202, 203, 204, 205, 206, 207, 208, 209, 210, 211, 212, 213, 214, 215, 216, 217, 218, 219, 220, 221, 222, 223, 224, 225, 226, 227, 228, 229, 230, 231, 232, 233, 234, 235, 236, 237, 238, 239, 240, 241, 242, 243, 244, 245, 246, 247, 248, 249, 250, 251, 252, 253, 254, 255, 256, 257, 258, 259, 260, 261, 262, 263, 264, 265, 266, 267, 268, 269, 270, 271, 272, 273, 274, 275, 276, 277, 278, 279, 280, 281, 282, 283, 284, 285, 286, 287, 288, 289, 290, 291, 292, 293, 294, 295, 296, 297, 298, 299, 300, 301, 312, or 313, a variant, derivative, orthologue, paralogue or homologue thereof, in which:

[0844] the amino acid at Mutated site 4 is Glu, and the amino acid at Mutated site 5 is Gly.

[0845] In another preferred embodiment, the mutated PPO comprises a sequence of SEQ ID NO: 1, 2, 3, 4, 5, 6, 7, 8, 9, 10, 11, 12, 13, 14, 15, 16, 17, 18, 19, 20, 21, 22, 23, 24, 25, 26, 27, 28, 29, 30, 31, 32, 33, 34, 35, 36, 37, 38, 39, 40, 41, 42, 43, 44, 45, 46, 47, 48, 49, 50, 51, 52, 53, 54, 55, 56, 57, 58, 59, 60, 61, 62, 63, 64, 65, 66, 67, 68, 69, 70, 71, 72, 73, 74, 75, 76, 77, 78, 79, 80, 81, 82, 83, 84, 85, 86, 87, 88, 89, 90, 91, 92, 93, 94, 95, 96, 97, 98, 99, 100, 101, 102, 103, 104, 105, 106, 107, 108, 109, 110, 111, 112, 113, 114, 115, 116, 117, 118, 119, 120, 121, 122, 123, 124, 125, 126, 127, 128, 129, 130, 131, 132, 133, 134, 135, 136, 137, 138, 139, 140, 141, 142, 143, 144, 145, 146, 147, 148, 149, 150, 151, 152, 153, 154, 155, 156, 157, 158, 159, 160, 161, 162, 163, 164, 165, 166, 167, 168, 169, 170, 171, 172, 173, 174, 175, 176, 177, 178, 179, 180, 181, 182, 183, 184, 185, 186, 187, 188, 189, 190, 191, 192, 193, 194, 195, 196, 197, 198, 199, 200, 201, 202, 203, 204, 205, 206, 207, 208, 209, 210, 211, 212, 213, 214, 215, 216, 217, 218, 219, 220, 221, 222, 223, 224, 225, 226, 227, 228, 229, 230, 231, 232, 233, 234, 235, 236, 237, 238, 239, 240, 241, 242, 243, 244, 245, 246, 247, 248, 249, 250, 251, 252, 253, 254, 255, 256, 257, 258, 259, 260, 261, 262, 263, 264, 265, 266, 267, 268, 269, 270, 271, 272, 273, 274, 275, 276, 277, 278, 279, 280, 281, 282, 283, 284, 285, 286, 287, 288, 289, 290, 291, 292, 293, 294, 295, 296, 297, 298, 299, 300, 301, 312, or 313, a variant, derivative, orthologue, paralogue or homologue thereof, in which:

[0846] the amino acid at Mutated site 4 is Glu, and the amino acid at Mutated site 5 is Pro.

[0847] In another preferred embodiment, the mutated PPO comprises a sequence of SEQ ID NO: 1, 2, 3, 4, 5, 6, 7, 8, 9, 10, 11, 12, 13, 14, 15, 16, 17, 18, 19, 20, 21, 22, 23, 24, 25, 26, 27, 28, 29, 30, 31, 32, 33, 34, 35, 36, 37, 38, 39, 40, 41, 42, 43, 44, 45, 46, 47, 48, 49, 50, 51, 52, 53, 54, 55, 56, 57, 58, 59, 60, 61, 62, 63, 64, 65, 66, 67, 68, 69, 70, 71, 72, 73, 74, 75, 76, 77, 78, 79, 80, 81, 82, 83, 84, 85, 86, 87, 88, 89, 90, 91, 92, 93, 94, 95, 96, 97, 98, 99, 100, 101, 102, 103, 104, 105, 106, 107, 108, 109, 110, 111, 112, 113, 114, 115, 116, 117, 118, 119, 120, 121, 122, 123, 124, 125, 126, 127, 128, 129, 130, 131, 132, 133, 134, 135, 136, 137, 138, 139, 140, 141, 142, 143, 144, 145, 146, 147, 148, 149, 150, 151, 152, 153, 154, 155, 156, 157, 158, 159, 160, 161, 162, 163, 164, 165, 166, 167, 168, 169, 170, 171, 172, 173, 174, 175, 176, 177, 178, 179, 180, 181, 182, 183, 184, 185, 186, 187, 188, 189, 190, 191, 192, 193, 194, 195, 196, 197, 198, 199, 200, 201, 202, 203, 204, 205, 206, 207, 208, 209, 210, 211, 212, 213, 214, 215, 216, 217, 218, 219, 220, 221, 222, 223, 224, 225, 226, 227, 228, 229, 230, 231, 232, 233, 234, 235, 236, 237, 238, 239, 240, 241, 242, 243, 244, 245, 246, 247, 248, 249, 250, 251, 252, 253, 254, 255, 256, 257, 258, 259, 260, 261, 262, 263, 264, 265, 266, 267, 268, 269, 270, 271, 272, 273, 274, 275, 276, 277, 278, 279, 280, 281, 282, 283, 284, 285, 286, 287, 288, 289, 290, 291, 292, 293, 294, 295, 296, 297, 298, 299, 300, 301, 312, or 313, a variant, derivative, orthologue, paralogue or homologue thereof, in which:

[0848] the amino acid at Mutated site 4 is Glu, and the amino acid at Mutated site 5 is Arg.

[0849] In another preferred embodiment, the mutated PPO comprises a sequence of SEQ ID NO: 1, 2, 3, 4, 5, 6, 7, 8, 9, 10, 11, 12, 13, 14, 15, 16, 17, 18, 19, 20, 21, 22, 23, 24, 25, 26, 27, 28, 29, 30, 31, 32, 33, 34, 35, 36, 37, 38, 39, 40, 41, 42, 43, 44, 45, 46, 47, 48, 49, 50, 51, 52, 53, 54, 55, 56, 57, 58, 59, 60, 61, 62, 63, 64, 65, 66, 67, 68, 69, 70, 71, 72, 73, 74, 75, 76, 77, 78, 79, 80, 81, 82, 83, 84, 85, 86, 87, 88, 89, 90, 91, 92, 93, 94, 95, 96, 97, 98, 99, 100, 101, 102, 103, 104, 105, 106, 107, 108, 109, 110, 111, 112, 113, 114, 115, 116, 117, 118, 119, 120, 121, 122, 123, 124, 125, 126, 127, 128, 129, 130, 131, 132, 133, 134, 135, 136, 137, 138, 139, 140, 141, 142, 143, 144, 145, 146, 147, 148, 149, 150, 151, 152, 153, 154, 155, 156, 157, 158, 159, 160, 161, 162, 163, 164, 165, 166, 167, 168, 169, 170, 171, 172, 173, 174, 175, 176, 177, 178, 179, 180, 181, 182, 183, 184, 185, 186, 187, 188, 189, 190, 191, 192, 193, 194, 195, 196, 197, 198, 199, 200, 201, 202, 203, 204, 205, 206, 207, 208, 209, 210, 211, 212, 213, 214, 215, 216, 217, 218, 219, 220, 221, 222, 223, 224, 225, 226, 227, 228, 229, 230, 231, 232, 233, 234, 235, 236, 237, 238, 239, 240, 241, 242, 243, 244, 245, 246, 247, 248, 249, 250, 251, 252, 253, 254, 255, 256, 257, 258, 259, 260, 261, 262, 263, 264, 265, 266, 267, 268, 269, 270, 271, 272, 273, 274, 275, 276, 277, 278, 279, 280, 281, 282, 283, 284, 285, 286, 287, 288, 289, 290, 291, 292, 293, 294, 295, 296, 297, 298, 299, 300, 301, 312, or 313, a variant, derivative, orthologue, paralogue or homologue thereof, in which:

[0850] the amino acid at Mutated site 4 is Glu, and the amino acid at Mutated site 5 is Tyr.

[0851] In another preferred embodiment, the mutated PPO comprises a sequence of SEQ ID NO: 1, 2, 3, 4, 5, 6, 7, 8, 9, 10, 11, 12, 13, 14, 15, 16, 17, 18, 19, 20, 21, 22, 23, 24, 25, 26, 27, 28, 29, 30, 31, 32, 33, 34, 35, 36, 37, 38, 39, 40, 41, 42, 43, 44, 45, 46, 47, 48, 49, 50, 51, 52, 53, 54, 55, 56, 57, 58, 59, 60, 61, 62, 63, 64, 65, 66, 67, 68, 69, 70, 71, 72, 73, 74, 75, 76, 77, 78, 79, 80, 81, 82, 83, 84, 85, 86, 87, 88, 89, 90, 91, 92, 93, 94, 95, 96, 97, 98, 99, 100, 101, 102, 103, 104, 105, 106, 107, 108, 109, 110, 111, 112, 113, 114, 115, 116, 117, 118, 119, 120, 121, 122, 123, 124, 125, 126, 127, 128, 129, 130, 131, 132, 133, 134, 135, 136, 137, 138, 139, 140, 141, 142, 143, 144, 145, 146, 147, 148, 149, 150, 151, 152, 153, 154, 155, 156, 157, 158, 159, 160, 161, 162, 163, 164, 165, 166, 167, 168, 169, 170, 171, 172, 173, 174, 175, 176, 177, 178, 179, 180, 181, 182, 183, 184, 185, 186, 187, 188, 189, 190, 191, 192, 193, 194, 195, 196, 197, 198, 199, 200, 201, 202, 203, 204, 205, 206, 207, 208, 209, 210, 211, 212, 213, 214, 215, 216, 217, 218, 219, 220, 221, 222, 223, 224, 225, 226, 227, 228, 229, 230, 231, 232, 233, 234, 235, 236, 237, 238, 239, 240, 241, 242, 243, 244, 245, 246, 247, 248, 249, 250, 251, 252, 253, 254, 255, 256, 257, 258, 259, 260, 261, 262, 263, 264, 265, 266, 267, 268, 269, 270, 271, 272, 273, 274, 275, 276, 277, 278, 279, 280, 281, 282, 283, 284, 285, 286, 287, 288, 289, 290, 291, 292, 293, 294, 295, 296, 297, 298, 299, 300, 301, 312, or 313, a variant, derivative, orthologue, paralogue or homologue thereof, in which:

[0852] the amino acid at Mutated site 4 is Glu, and the amino acid at Mutated site 5 is Trp.

[0853] In another preferred embodiment, the mutated PPO comprises a sequence of SEQ ID NO: 1, 2, 3, 4, 5, 6, 7, 8, 9, 10, 11, 12, 13, 14, 15, 16, 17, 18, 19, 20, 21, 22, 23, 24, 25, 26, 27, 28, 29, 30, 31, 32, 33, 34, 35, 36, 37, 38, 39, 40, 41, 42, 43, 44, 45, 46, 47, 48, 49, 50, 51, 52, 53, 54, 55, 56, 57, 58, 59, 60, 61, 62, 63, 64, 65, 66, 67, 68, 69, 70, 71, 72, 73, 74, 75, 76, 77, 78, 79, 80, 81, 82, 83, 84, 85, 86, 87, 88, 89, 90, 91, 92, 93, 94, 95, 96, 97, 98, 99, 100, 101, 102, 103, 104, 105, 106, 107, 108, 109, 110, 111, 112, 113, 114, 115, 116, 117, 118, 119, 120, 121, 122, 123, 124, 125, 126, 127, 128, 129, 130, 131, 132, 133, 134, 135, 136, 137, 138, 139, 140, 141, 142, 143, 144, 145, 146, 147, 148, 149, 150, 151, 152, 153, 154, 155, 156, 157, 158, 159, 160, 161, 162, 163, 164, 165, 166, 167, 168, 169, 170, 171, 172, 173, 174, 175, 176, 177, 178, 179, 180, 181, 182, 183, 184, 185, 186, 187, 188, 189, 190, 191, 192, 193, 194, 195, 196, 197, 198, 199, 200, 201, 202, 203, 204, 205, 206, 207, 208, 209, 210, 211, 212, 213, 214, 215, 216, 217, 218, 219, 220, 221, 222, 223, 224, 225, 226, 227, 228, 229, 230, 231, 232, 233, 234, 235, 236, 237, 238, 239, 240, 241, 242, 243, 244, 245, 246, 247, 248, 249, 250, 251, 252, 253, 254, 255, 256, 257, 258, 259, 260, 261, 262, 263, 264, 265, 266, 267, 268, 269, 270, 271, 272, 273, 274, 275, 276, 277, 278, 279, 280, 281, 282, 283, 284, 285, 286, 287, 288, 289, 290, 291, 292, 293, 294, 295, 296, 297, 298, 299, 300, 301, 312, or 313, a variant, derivative, orthologue, paralogue or homologue thereof, in which:

[0854] the amino acid at Mutated site 4 is Ser, and the amino acid at Mutated site 5 is Ala.

[0855] In another preferred embodiment, the mutated PPO comprises a sequence of SEQ ID NO: 1, 2, 3, 4, 5, 6, 7, 8, 9, 10, 11, 12, 13, 14, 15, 16, 17, 18, 19, 20, 21, 22, 23, 24, 25, 26, 27, 28, 29, 30, 31, 32, 33, 34, 35, 36, 37, 38, 39, 40, 41, 42, 43, 44, 45, 46, 47, 48, 49, 50, 51, 52, 53, 54, 55, 56, 57, 58, 59, 60, 61, 62, 63, 64, 65, 66, 67, 68, 69, 70, 71, 72, 73, 74, 75, 76, 77, 78, 79, 80, 81, 82, 83, 84, 85, 86, 87, 88, 89, 90, 91, 92, 93, 94, 95, 96, 97, 98, 99, 100, 101, 102, 103, 104, 105, 106, 107, 108, 109, 110, 111, 112, 113, 114, 115, 116, 117, 118, 119, 120, 121, 122, 123, 124, 125, 126, 127, 128, 129, 130, 131, 132, 133, 134, 135, 136, 137, 138, 139, 140, 141, 142, 143, 144, 145, 146, 147, 148, 149, 150, 151, 152, 153, 154, 155, 156, 157, 158, 159, 160, 161, 162, 163, 164, 165, 166, 167, 168, 169, 170, 171, 172, 173, 174, 175, 176, 177, 178, 179, 180, 181, 182, 183, 184, 185, 186, 187, 188, 189, 190, 191, 192, 193, 194, 195, 196, 197, 198, 199, 200, 201, 202, 203, 204, 205, 206, 207, 208, 209, 210, 211, 212, 213, 214, 215, 216, 217, 218, 219, 220, 221, 222, 223, 224, 225, 226, 227, 228, 229, 230, 231, 232, 233, 234, 235, 236, 237, 238, 239, 240, 241, 242, 243, 244, 245, 246, 247, 248, 249, 250, 251, 252, 253, 254, 255, 256, 257, 258, 259, 260, 261, 262, 263, 264, 265, 266, 267, 268, 269, 270, 271, 272, 273, 274, 275, 276, 277, 278, 279, 280, 281, 282, 283, 284, 285, 286, 287, 288, 289, 290, 291, 292, 293, 294, 295, 296, 297, 298, 299, 300, 301, 312, or 313, a variant, derivative, orthologue, paralogue or homologue thereof, in which:

[0856] the amino acid at Mutated site 4 is Ser, and the amino acid at Mutated site 5 is Leu.

[0857] In another preferred embodiment, the mutated PPO comprises a sequence of SEQ ID NO: 1, 2, 3, 4, 5, 6, 7, 8, 9, 10, 11, 12, 13, 14, 15, 16, 17, 18, 19, 20, 21, 22, 23, 24, 25, 26, 27, 28, 29, 30, 31, 32, 33, 34, 35, 36, 37, 38, 39, 40, 41, 42, 43, 44, 45, 46, 47, 48, 49, 50, 51, 52, 53, 54, 55, 56, 57, 58, 59, 60, 61, 62, 63, 64, 65, 66, 67, 68, 69, 70, 71, 72, 73, 74, 75, 76, 77, 78, 79, 80, 81, 82, 83, 84, 85, 86, 87, 88, 89, 90, 91, 92, 93, 94, 95, 96, 97, 98, 99, 100, 101, 102, 103, 104, 105, 106, 107, 108, 109, 110, 111, 112, 113, 114, 115, 116, 117, 118, 119, 120, 121, 122, 123, 124, 125, 126, 127, 128, 129, 130, 131, 132, 133, 134, 135, 136, 137, 138, 139, 140, 141, 142, 143, 144, 145, 146, 147, 148, 149, 150, 151, 152, 153, 154, 155, 156, 157, 158, 159, 160, 161, 162, 163, 164, 165, 166, 167, 168, 169, 170, 171, 172, 173, 174, 175, 176, 177, 178, 179, 180, 181, 182, 183, 184, 185, 186, 187, 188, 189, 190, 191, 192, 193, 194, 195, 196, 197, 198, 199, 200, 201, 202, 203, 204, 205, 206, 207, 208, 209, 210, 211, 212, 213, 214, 215, 216, 217, 218, 219, 220, 221, 222, 223, 224, 225, 226, 227, 228, 229, 230, 231, 232, 233, 234, 235, 236, 237, 238, 239, 240, 241, 242, 243, 244, 245, 246, 247, 248, 249, 250, 251, 252, 253, 254, 255, 256, 257, 258, 259, 260, 261, 262, 263, 264, 265, 266, 267, 268, 269, 270, 271, 272, 273, 274, 275, 276, 277, 278, 279, 280, 281, 282, 283, 284, 285, 286, 287, 288, 289, 290, 291, 292, 293, 294, 295, 296, 297, 298, 299, 300, 301, 312, or 313, a variant, derivative, orthologue, paralogue or homologue thereof, in which:

[0858] the amino acid at Mutated site 4 is Ser, and the amino acid at Mutated site 5 is Val.

[0859] In another preferred embodiment, the mutated PPO comprises a sequence of SEQ ID NO: 1, 2, 3, 4, 5, 6, 7, 8, 9, 10, 11, 12, 13, 14, 15, 16, 17, 18, 19, 20, 21, 22, 23, 24, 25, 26, 27, 28, 29, 30, 31, 32, 33, 34, 35, 36, 37, 38, 39, 40, 41, 42, 43, 44, 45, 46, 47, 48, 49, 50, 51, 52, 53, 54, 55, 56, 57, 58, 59, 60, 61, 62, 63, 64, 65, 66, 67, 68, 69, 70, 71, 72, 73, 74, 75, 76, 77, 78, 79, 80, 81, 82, 83, 84, 85, 86, 87, 88, 89, 90, 91, 92, 93, 94, 95, 96, 97, 98, 99, 100, 101, 102, 103, 104, 105, 106, 107, 108, 109, 110, 111, 112, 113, 114, 115, 116, 117, 118, 119, 120, 121, 122, 123, 124, 125, 126, 127, 128, 129, 130, 131, 132, 133, 134, 135, 136, 137, 138, 139, 140, 141, 142, 143, 144, 145, 146, 147, 148, 149, 150, 151, 152, 153, 154, 155, 156, 157, 158, 159, 160, 161, 162, 163, 164, 165, 166, 167, 168, 169, 170, 171, 172, 173, 174, 175, 176, 177, 178, 179, 180, 181, 182, 183, 184, 185, 186, 187, 188, 189, 190, 191, 192, 193, 194, 195, 196, 197, 198, 199, 200, 201, 202, 203, 204, 205, 206, 207, 208, 209, 210, 211, 212, 213, 214, 215, 216, 217, 218, 219, 220, 221, 222, 223, 224, 225, 226, 227, 228, 229, 230, 231, 232, 233, 234, 235, 236, 237, 238, 239, 240, 241, 242, 243, 244, 245, 246, 247, 248, 249, 250, 251, 252, 253, 254, 255, 256, 257, 258, 259, 260, 261, 262, 263, 264, 265, 266, 267, 268, 269, 270, 271, 272, 273, 274, 275, 276, 277, 278, 279, 280, 281, 282, 283, 284, 285, 286, 287, 288, 289, 290, 291, 292, 293, 294, 295, 296, 297, 298, 299, 300, 301, 312, or 313, a variant, derivative, orthologue, paralogue or homologue thereof, in which:

[0860] the amino acid at Mutated site 4 is Ser, and the amino acid at Mutated site 5 is Ile.

[0861] In another preferred embodiment, the mutated PPO comprises a sequence of SEQ ID NO: 1, 2, 3, 4, 5, 6, 7, 8, 9, 10, 11, 12, 13, 14, 15, 16, 17, 18, 19, 20, 21, 22, 23, 24, 25, 26, 27, 28, 29, 30, 31, 32, 33, 34, 35, 36, 37, 38, 39, 40, 41, 42, 43, 44, 45, 46, 47, 48, 49, 50, 51, 52, 53, 54, 55, 56, 57, 58, 59, 60, 61, 62, 63, 64, 65, 66, 67, 68, 69, 70, 71, 72, 73, 74, 75, 76, 77, 78, 79, 80, 81, 82, 83, 84, 85, 86, 87, 88, 89, 90, 91, 92, 93, 94, 95, 96, 97, 98, 99, 100, 101, 102, 103, 104, 105, 106, 107, 108, 109, 110, 111, 112, 113, 114, 115, 116, 117, 118, 119, 120, 121, 122, 123, 124, 125, 126, 127, 128, 129, 130, 131, 132, 133, 134, 135, 136, 137, 138, 139, 140, 141, 142, 143, 144, 145, 146, 147, 148, 149, 150, 151, 152, 153, 154, 155, 156, 157, 158, 159, 160, 161, 162, 163, 164, 165, 166, 167, 168, 169, 170, 171, 172, 173, 174, 175, 176, 177, 178, 179, 180, 181, 182, 183, 184, 185, 186, 187, 188, 189, 190, 191, 192, 193, 194, 195, 196, 197, 198, 199, 200, 201, 202, 203, 204, 205, 206, 207, 208, 209, 210, 211, 212, 213, 214, 215, 216, 217, 218, 219, 220, 221, 222, 223, 224, 225, 226, 227, 228, 229, 230, 231, 232, 233, 234, 235, 236, 237, 238, 239, 240, 241, 242, 243, 244, 245, 246, 247, 248, 249, 250, 251, 252, 253, 254, 255, 256, 257, 258, 259, 260, 261, 262, 263, 264, 265, 266, 267, 268, 269, 270, 271, 272, 273, 274, 275, 276, 277, 278, 279, 280, 281, 282, 283, 284, 285, 286, 287, 288, 289, 290, 291, 292, 293, 294, 295, 296, 297, 298, 299, 300, 301, 312, or 313, a variant, derivative, orthologue, paralogue or homologue thereof, in which:

[0862] the amino acid at Mutated site 4 is Ser, and the amino acid at Mutated site 5 is Met.

[0863] In another preferred embodiment, the mutated PPO comprises a sequence of SEQ ID NO: 1, 2, 3, 4, 5, 6, 7, 8, 9, 10, 11, 12, 13, 14, 15, 16, 17, 18, 19, 20, 21, 22, 23, 24, 25, 26, 27, 28, 29, 30, 31, 32, 33, 34, 35, 36, 37, 38, 39, 40, 41, 42, 43, 44, 45, 46, 47, 48, 49, 50, 51, 52, 53, 54, 55, 56, 57, 58, 59, 60, 61, 62, 63, 64, 65, 66, 67, 68, 69, 70, 71, 72, 73, 74, 75, 76, 77, 78, 79, 80, 81, 82, 83, 84, 85, 86, 87, 88, 89, 90, 91, 92, 93, 94, 95, 96, 97, 98, 99, 100, 101, 102, 103, 104, 105, 106, 107, 108, 109, 110, 111, 112, 113, 114, 115, 116, 117, 118, 119, 120, 121, 122, 123, 124, 125, 126, 127, 128, 129, 130, 131, 132, 133, 134, 135, 136, 137, 138, 139, 140, 141, 142, 143, 144, 145, 146, 147, 148, 149, 150, 151, 152, 153, 154, 155, 156, 157, 158, 159, 160, 161, 162, 163, 164, 165, 166, 167, 168, 169, 170, 171, 172, 173, 174, 175, 176, 177, 178, 179, 180, 181, 182, 183, 184, 185, 186, 187, 188, 189, 190, 191, 192, 193, 194, 195, 196, 197, 198, 199, 200, 201, 202, 203, 204, 205, 206, 207, 208, 209, 210, 211, 212, 213, 214, 215, 216, 217, 218, 219, 220, 221, 222, 223, 224, 225, 226, 227, 228, 229, 230, 231, 232, 233, 234, 235, 236, 237, 238, 239, 240, 241, 242, 243, 244, 245, 246, 247, 248, 249, 250, 251, 252, 253, 254, 255, 256, 257, 258, 259, 260, 261, 262, 263, 264, 265, 266, 267, 268, 269, 270, 271, 272, 273, 274, 275, 276, 277, 278, 279, 280, 281, 282, 283, 284, 285, 286, 287, 288, 289, 290, 291, 292, 293, 294, 295, 296, 297, 298, 299, 300, 301, 312, or 313, a variant, derivative, orthologue, paralogue or homologue thereof, in which:

[0864] the amino acid at Mutated site 4 is Ser, and the amino acid at Mutated site 5 is His.

[0865] In another preferred embodiment, the mutated PPO comprises a sequence of SEQ ID NO: 1, 2, 3, 4, 5, 6, 7, 8, 9, 10, 11, 12, 13, 14, 15, 16, 17, 18, 19, 20, 21, 22, 23, 24, 25, 26, 27, 28, 29, 30, 31, 32, 33, 34, 35, 36, 37, 38, 39, 40, 41, 42, 43, 44, 45, 46, 47, 48, 49, 50, 51, 52, 53, 54, 55, 56, 57, 58, 59, 60, 61, 62, 63, 64, 65, 66, 67, 68, 69, 70, 71, 72, 73, 74, 75, 76, 77, 78, 79, 80, 81, 82, 83, 84, 85, 86, 87, 88, 89, 90, 91, 92, 93, 94, 95, 96, 97, 98, 99, 100, 101, 102, 103, 104, 105, 106, 107, 108, 109, 110, 111, 112, 113, 114, 115, 116, 117, 118, 119, 120, 121, 122, 123, 124, 125, 126, 127, 128, 129, 130, 131, 132, 133, 134, 135, 136, 137, 138, 139, 140, 141, 142, 143, 144, 145, 146, 147, 148, 149, 150, 151, 152, 153, 154, 155, 156, 157, 158, 159, 160, 161, 162, 163, 164, 165, 166, 167, 168, 169, 170, 171, 172, 173, 174, 175, 176, 177, 178, 179, 180, 181, 182, 183, 184, 185, 186, 187, 188, 189, 190, 191, 192, 193, 194, 195, 196, 197, 198, 199, 200, 201, 202, 203, 204, 205, 206, 207, 208, 209, 210, 211, 212, 213, 214, 215, 216, 217, 218, 219, 220, 221, 222, 223, 224, 225, 226, 227, 228, 229, 230, 231, 232, 233, 234, 235, 236, 237, 238, 239, 240, 241, 242, 243, 244, 245, 246, 247, 248, 249, 250, 251, 252, 253, 254, 255, 256, 257, 258, 259, 260, 261, 262, 263, 264, 265, 266, 267, 268, 269, 270, 271, 272, 273, 274, 275, 276, 277, 278, 279, 280, 281, 282, 283, 284, 285, 286, 287, 288, 289, 290, 291, 292, 293, 294, 295, 296, 297, 298, 299, 300, 301, 312, or 313, a variant, derivative, orthologue, paralogue or homologue thereof, in which:

[0866] the amino acid at Mutated site 4 is Ser, and the amino acid at Mutated site 5 is Lys.

[0867] In another preferred embodiment, the mutated PPO comprises a sequence of SEQ ID NO: 1, 2, 3, 4, 5, 6, 7, 8, 9, 10, 11, 12, 13, 14, 15, 16, 17, 18, 19, 20, 21, 22, 23, 24, 25, 26, 27, 28, 29, 30, 31, 32, 33, 34, 35, 36, 37, 38, 39, 40, 41, 42, 43, 44, 45, 46, 47, 48, 49, 50, 51, 52, 53, 54, 55, 56, 57, 58, 59, 60, 61, 62, 63, 64, 65, 66, 67, 68, 69, 70, 71, 72, 73, 74, 75, 76, 77, 78, 79, 80, 81, 82, 83, 84, 85, 86, 87, 88, 89, 90, 91, 92, 93, 94, 95, 96, 97, 98, 99, 100, 101, 102, 103, 104, 105, 106, 107, 108, 109, 110, 111, 112, 113, 114, 115, 116, 117, 118, 119, 120, 121, 122, 123, 124, 125, 126, 127, 128, 129, 130, 131, 132, 133, 134, 135, 136, 137, 138, 139, 140, 141, 142, 143, 144, 145, 146, 147, 148, 149, 150, 151, 152, 153, 154, 155, 156, 157, 158, 159, 160, 161, 162, 163, 164, 165, 166, 167, 168, 169, 170, 171, 172, 173, 174, 175, 176, 177, 178, 179, 180, 181, 182, 183, 184, 185, 186, 187, 188, 189, 190, 191, 192, 193, 194, 195, 196, 197, 198, 199, 200, 201, 202, 203, 204, 205, 206, 207, 208, 209, 210, 211, 212, 213, 214, 215, 216, 217, 218, 219, 220, 221, 222, 223, 224, 225, 226, 227, 228, 229, 230, 231, 232, 233, 234, 235, 236, 237, 238, 239, 240, 241, 242, 243, 244, 245, 246, 247, 248, 249, 250, 251, 252, 253, 254, 255, 256, 257, 258, 259, 260, 261, 262, 263, 264, 265, 266, 267, 268, 269, 270, 271, 272, 273, 274, 275, 276, 277, 278, 279, 280, 281, 282, 283, 284, 285, 286, 287, 288, 289, 290, 291, 292, 293, 294, 295, 296, 297, 298, 299, 300, 301, 312, or 313, a variant, derivative, orthologue, paralogue or homologue thereof, in which:

[0868] the amino acid at Mutated site 4 is Ser, and the amino acid at Mutated site 5 is Asp.

[0869] In another preferred embodiment, the mutated PPO comprises a sequence of SEQ ID NO: 1, 2, 3, 4, 5, 6, 7, 8, 9, 10, 11, 12, 13, 14, 15, 16, 17, 18, 19, 20, 21, 22, 23, 24, 25, 26, 27, 28, 29, 30, 31, 32, 33, 34, 35, 36, 37, 38, 39, 40, 41, 42, 43, 44, 45, 46, 47, 48, 49, 50, 51, 52, 53, 54, 55, 56, 57, 58, 59, 60, 61, 62, 63, 64, 65, 66, 67, 68, 69, 70, 71, 72, 73, 74, 75, 76, 77, 78, 79, 80, 81, 82, 83, 84, 85, 86, 87, 88, 89, 90, 91, 92, 93, 94, 95, 96, 97, 98, 99, 100, 101, 102, 103, 104, 105, 106, 107, 108, 109, 110, 111, 112, 113, 114, 115, 116, 117, 118, 119, 120, 121, 122, 123, 124, 125, 126, 127, 128, 129, 130, 131, 132, 133, 134, 135, 136, 137, 138, 139, 140, 141, 142, 143, 144, 145, 146, 147, 148, 149, 150, 151, 152, 153, 154, 155, 156, 157, 158, 159, 160, 161, 162, 163, 164, 165, 166, 167, 168, 169, 170, 171, 172, 173, 174, 175, 176, 177, 178, 179, 180, 181, 182, 183, 184, 185, 186, 187, 188, 189, 190, 191, 192, 193, 194, 195, 196, 197, 198, 199, 200, 201, 202, 203, 204, 205, 206, 207, 208, 209, 210, 211, 212, 213, 214, 215, 216, 217, 218, 219, 220, 221, 222, 223, 224, 225, 226, 227, 228, 229, 230, 231, 232, 233, 234, 235, 236, 237, 238, 239, 240, 241, 242, 243, 244, 245, 246, 247, 248, 249, 250, 251, 252, 253, 254, 255, 256, 257, 258, 259, 260, 261, 262, 263, 264, 265, 266, 267, 268, 269, 270, 271, 272, 273, 274, 275, 276, 277, 278, 279, 280, 281, 282, 283, 284, 285, 286, 287, 288, 289, 290, 291, 292, 293, 294, 295, 296, 297, 298, 299, 300, 301, 312, or 313, a variant, derivative, orthologue, paralogue or homologue thereof, in which:

[0870] the amino acid at Mutated site 4 is Ser, and the amino acid at Mutated site 5 is Glu.

[0871] In another preferred embodiment, the mutated PPO comprises a sequence of SEQ ID NO: 1, 2, 3, 4, 5, 6, 7, 8, 9, 10, 11, 12, 13, 14, 15, 16, 17, 18, 19, 20, 21, 22, 23, 24, 25, 26, 27, 28, 29, 30, 31, 32, 33, 34, 35, 36, 37, 38, 39, 40, 41, 42, 43, 44, 45, 46, 47, 48, 49, 50, 51, 52, 53, 54, 55, 56, 57, 58, 59, 60, 61, 62, 63, 64, 65, 66, 67, 68, 69, 70, 71, 72, 73, 74, 75, 76, 77, 78, 79, 80, 81, 82, 83, 84, 85, 86, 87, 88, 89, 90, 91, 92, 93, 94, 95, 96, 97, 98, 99, 100, 101, 102, 103, 104, 105, 106, 107, 108, 109, 110, 111, 112, 113, 114, 115, 116, 117, 118, 119, 120, 121, 122, 123, 124, 125, 126, 127, 128, 129, 130, 131, 132, 133, 134, 135, 136, 137, 138, 139, 140, 141, 142, 143, 144, 145, 146, 147, 148, 149, 150, 151, 152, 153, 154, 155, 156, 157, 158, 159, 160, 161, 162, 163, 164, 165, 166, 167, 168, 169, 170, 171, 172, 173, 174, 175, 176, 177, 178, 179, 180, 181, 182, 183, 184, 185, 186, 187, 188, 189, 190, 191, 192, 193, 194, 195, 196, 197, 198, 199, 200, 201, 202, 203, 204, 205, 206, 207, 208, 209, 210, 211, 212, 213, 214, 215, 216, 217, 218, 219, 220, 221, 222, 223, 224, 225, 226, 227, 228, 229, 230, 231, 232, 233, 234, 235, 236, 237, 238, 239, 240, 241, 242, 243, 244, 245, 246, 247, 248, 249, 250, 251, 252, 253, 254, 255, 256, 257, 258, 259, 260, 261, 262, 263, 264, 265, 266, 267, 268, 269, 270, 271, 272, 273, 274, 275, 276, 277, 278, 279, 280, 281, 282, 283, 284, 285, 286, 287, 288, 289, 290, 291, 292, 293, 294, 295, 296, 297, 298, 299, 300, 301, 312, or 313, a variant, derivative, orthologue, paralogue or homologue thereof, in which:

[0872] the amino acid at Mutated site 4 is Ser, and the amino acid at Mutated site 5 is Ser.

[0873] In another preferred embodiment, the mutated PPO comprises a sequence of SEQ ID NO: 1, 2, 3, 4, 5, 6, 7, 8, 9, 10, 11, 12, 13, 14, 15, 16, 17, 18, 19, 20, 21, 22, 23, 24, 25, 26, 27, 28, 29, 30, 31, 32, 33, 34, 35, 36, 37, 38, 39, 40, 41, 42, 43, 44, 45, 46, 47, 48, 49, 50, 51, 52, 53, 54, 55, 56, 57, 58, 59, 60, 61, 62, 63, 64, 65, 66, 67, 68, 69, 70, 71, 72, 73, 74, 75, 76, 77, 78, 79, 80, 81, 82, 83, 84, 85, 86, 87, 88, 89, 90, 91, 92, 93, 94, 95, 96, 97, 98, 99, 100, 101, 102, 103, 104, 105, 106, 107, 108, 109, 110, 111, 112, 113, 114, 115, 116, 117, 118, 119, 120, 121, 122, 123, 124, 125, 126, 127, 128, 129, 130, 131, 132, 133, 134, 135, 136, 137, 138, 139, 140, 141, 142, 143, 144, 145, 146, 147, 148, 149, 150, 151, 152, 153, 154, 155, 156, 157, 158, 159, 160, 161, 162, 163, 164, 165, 166, 167, 168, 169, 170, 171, 172, 173, 174, 175, 176, 177, 178, 179, 180, 181, 182, 183, 184, 185, 186, 187, 188, 189, 190, 191, 192, 193, 194, 195, 196, 197, 198, 199, 200, 201, 202, 203, 204, 205, 206, 207, 208, 209, 210, 211, 212, 213, 214, 215, 216, 217, 218, 219, 220, 221, 222, 223, 224, 225, 226, 227, 228, 229, 230, 231, 232, 233, 234, 235, 236, 237, 238, 239, 240, 241, 242, 243, 244, 245, 246, 247, 248, 249, 250, 251, 252, 253, 254, 255, 256, 257, 258, 259, 260, 261, 262, 263, 264, 265, 266, 267, 268, 269, 270, 271, 272, 273, 274, 275, 276, 277, 278, 279, 280, 281, 282, 283, 284, 285, 286, 287, 288, 289, 290, 291, 292, 293, 294, 295, 296, 297, 298, 299, 300, 301, 312, or 313, a variant, derivative, orthologue, paralogue or homologue thereof, in which:

[0874] the amino acid at Mutated site 4 is Ser, and the amino acid at Mutated site 5 is Thr.

[0875] In another preferred embodiment, the mutated PPO comprises a sequence of SEQ ID NO: 1, 2, 3, 4, 5, 6, 7, 8, 9, 10, 11, 12, 13, 14, 15, 16, 17, 18, 19, 20, 21, 22, 23, 24, 25, 26, 27, 28, 29, 30, 31, 32, 33, 34, 35, 36, 37, 38, 39, 40, 41, 42, 43, 44, 45, 46, 47, 48, 49, 50, 51, 52, 53, 54, 55, 56, 57, 58, 59, 60, 61, 62, 63, 64, 65, 66, 67, 68, 69, 70, 71, 72, 73, 74, 75, 76, 77, 78, 79, 80, 81, 82, 83, 84, 85, 86, 87, 88, 89, 90, 91, 92, 93, 94, 95, 96, 97, 98, 99, 100, 101, 102, 103, 104, 105, 106, 107, 108, 109, 110, 111, 112, 113, 114, 115, 116, 117, 118, 119, 120, 121, 122, 123, 124, 125, 126, 127, 128, 129, 130, 131, 132, 133, 134, 135, 136, 137, 138, 139, 140, 141, 142, 143, 144, 145, 146, 147, 148, 149, 150, 151, 152, 153, 154, 155, 156, 157, 158, 159, 160, 161, 162, 163, 164, 165, 166, 167, 168, 169, 170, 171, 172, 173, 174, 175, 176, 177, 178, 179, 180, 181, 182, 183, 184, 185, 186, 187, 188, 189, 190, 191, 192, 193, 194, 195, 196, 197, 198, 199, 200, 201, 202, 203, 204, 205, 206, 207, 208, 209, 210, 211, 212, 213, 214, 215, 216, 217, 218, 219, 220, 221, 222, 223, 224, 225, 226, 227, 228, 229, 230, 231, 232, 233, 234, 235, 236, 237, 238, 239, 240, 241, 242, 243, 244, 245, 246, 247, 248, 249, 250, 251, 252, 253, 254, 255, 256, 257, 258, 259, 260, 261, 262, 263, 264, 265, 266, 267, 268, 269, 270, 271, 272, 273, 274, 275, 276, 277, 278, 279, 280, 281, 282, 283, 284, 285, 286, 287, 288, 289, 290, 291, 292, 293, 294, 295, 296, 297, 298, 299, 300, 301, 312, or 313, a variant, derivative, orthologue, paralogue or homologue thereof, in which:

[0876] the amino acid at Mutated site 4 is Ser, and the amino acid at Mutated site 5 is Asn.

[0877] In another preferred embodiment, the mutated PPO comprises a sequence of SEQ ID NO: 1, 2, 3, 4, 5, 6, 7, 8, 9, 10, 11, 12, 13, 14, 15, 16, 17, 18, 19, 20, 21, 22, 23, 24, 25, 26, 27, 28, 29, 30, 31, 32, 33, 34, 35, 36, 37, 38, 39, 40, 41, 42, 43, 44, 45, 46, 47, 48, 49, 50, 51, 52, 53, 54, 55, 56, 57, 58, 59, 60, 61, 62, 63, 64, 65, 66, 67, 68, 69, 70, 71, 72, 73, 74, 75, 76, 77, 78, 79, 80, 81, 82, 83, 84, 85, 86, 87, 88, 89, 90, 91, 92, 93, 94, 95, 96, 97, 98, 99, 100, 101, 102, 103, 104, 105, 106, 107, 108, 109, 110, 111, 112, 113, 114, 115, 116, 117, 118, 119, 120, 121, 122, 123, 124, 125, 126, 127, 128, 129, 130, 131, 132, 133, 134, 135, 136, 137, 138, 139, 140, 141, 142, 143, 144, 145, 146, 147, 148, 149, 150, 151, 152, 153, 154, 155, 156, 157, 158, 159, 160, 161, 162, 163, 164, 165, 166, 167, 168, 169, 170, 171, 172, 173, 174, 175, 176, 177, 178, 179, 180, 181, 182, 183, 184, 185, 186, 187, 188, 189, 190, 191, 192, 193, 194, 195, 196, 197, 198, 199, 200, 201, 202, 203, 204, 205, 206, 207, 208, 209, 210, 211, 212, 213, 214, 215, 216, 217, 218, 219, 220, 221, 222, 223, 224, 225, 226, 227, 228, 229, 230, 231, 232, 233, 234, 235, 236, 237, 238, 239, 240, 241, 242, 243, 244, 245, 246, 247, 248, 249, 250, 251, 252, 253, 254, 255, 256, 257, 258, 259, 260, 261, 262, 263, 264, 265, 266, 267, 268, 269, 270, 271, 272, 273, 274, 275, 276, 277, 278, 279, 280, 281, 282, 283, 284, 285, 286, 287, 288, 289, 290, 291, 292, 293, 294, 295, 296, 297, 298, 299, 300, 301, 312, or 313, a variant, derivative, orthologue, paralogue or homologue thereof, in which:

[0878] the amino acid at Mutated site 4 is Ser, and the amino acid at Mutated site 5 is Gln.

[0879] In another preferred embodiment, the mutated PPO comprises a sequence of SEQ ID NO: 1, 2, 3, 4, 5, 6, 7, 8, 9, 10, 11, 12, 13, 14, 15, 16, 17, 18, 19, 20, 21, 22, 23, 24, 25, 26, 27, 28, 29, 30, 31, 32, 33, 34, 35, 36, 37, 38, 39, 40, 41, 42, 43, 44, 45, 46, 47, 48, 49, 50, 51, 52, 53, 54, 55, 56, 57, 58, 59, 60, 61, 62, 63, 64, 65, 66, 67, 68, 69, 70, 71, 72, 73, 74, 75, 76, 77, 78, 79, 80, 81, 82, 83, 84, 85, 86, 87, 88, 89, 90, 91, 92, 93, 94, 95, 96, 97, 98, 99, 100, 101, 102, 103, 104, 105, 106, 107, 108, 109, 110, 111, 112, 113, 114, 115, 116, 117, 118, 119, 120, 121, 122, 123, 124, 125, 126, 127, 128, 129, 130, 131, 132, 133, 134, 135, 136, 137, 138, 139, 140, 141, 142, 143, 144, 145, 146, 147, 148, 149, 150, 151, 152, 153, 154, 155, 156, 157, 158, 159, 160, 161, 162, 163, 164, 165, 166, 167, 168, 169, 170, 171, 172, 173, 174, 175, 176, 177, 178, 179, 180, 181, 182, 183, 184, 185, 186, 187, 188, 189, 190, 191, 192, 193, 194, 195, 196, 197, 198, 199, 200, 201, 202, 203, 204, 205, 206, 207, 208, 209, 210, 211, 212, 213, 214, 215, 216, 217, 218, 219, 220, 221, 222, 223, 224, 225, 226, 227, 228, 229, 230, 231, 232, 233, 234, 235, 236, 237, 238, 239, 240, 241, 242, 243, 244, 245, 246, 247, 248, 249, 250, 251, 252, 253, 254, 255, 256, 257, 258, 259, 260, 261, 262, 263, 264, 265, 266, 267, 268, 269, 270, 271, 272, 273, 274, 275, 276, 277, 278, 279, 280, 281, 282, 283, 284, 285, 286, 287, 288, 289, 290, 291, 292, 293, 294, 295, 296, 297, 298, 299, 300, 301, 312, or 313, a variant, derivative, orthologue, paralogue or homologue thereof, in which:

[0880] the amino acid at Mutated site 4 is Ser, and the amino acid at Mutated site 5 is Cys.

[0881] In another preferred embodiment, the mutated PPO comprises a sequence of SEQ ID NO: 1, 2, 3, 4, 5, 6, 7, 8, 9, 10, 11, 12, 13, 14, 15, 16, 17, 18, 19, 20, 21, 22, 23, 24, 25, 26, 27, 28, 29, 30, 31, 32, 33, 34, 35, 36, 37, 38, 39, 40, 41, 42, 43, 44, 45, 46, 47, 48, 49, 50, 51, 52, 53, 54, 55, 56, 57, 58, 59, 60, 61, 62, 63, 64, 65, 66, 67, 68, 69, 70, 71, 72, 73, 74, 75, 76, 77, 78, 79, 80, 81, 82, 83, 84, 85, 86, 87, 88, 89, 90, 91, 92, 93, 94, 95, 96, 97, 98, 99, 100, 101, 102, 103, 104, 105, 106, 107, 108, 109, 110, 111, 112, 113, 114, 115, 116, 117, 118, 119, 120, 121, 122, 123, 124, 125, 126, 127, 128, 129, 130, 131, 132, 133, 134, 135, 136, 137, 138, 139, 140, 141, 142, 143, 144, 145, 146, 147, 148, 149, 150, 151, 152, 153, 154, 155, 156, 157, 158, 159, 160, 161, 162, 163, 164, 165, 166, 167, 168, 169, 170, 171, 172, 173, 174, 175, 176, 177, 178, 179, 180, 181, 182, 183, 184, 185, 186, 187, 188, 189, 190, 191, 192, 193, 194, 195, 196, 197, 198, 199, 200, 201, 202, 203, 204, 205, 206, 207, 208, 209, 210, 211, 212, 213, 214, 215, 216, 217, 218, 219, 220, 221, 222, 223, 224, 225, 226, 227, 228, 229, 230, 231, 232, 233, 234, 235, 236, 237, 238, 239, 240, 241, 242, 243, 244, 245, 246, 247, 248, 249, 250, 251, 252, 253, 254, 255, 256, 257, 258, 259, 260, 261, 262, 263, 264, 265, 266, 267, 268, 269, 270, 271, 272, 273, 274, 275, 276, 277, 278, 279, 280, 281, 282, 283, 284, 285, 286, 287, 288, 289, 290, 291, 292, 293, 294, 295, 296, 297, 298, 299, 300, 301, 312, or 313, a variant, derivative, orthologue, paralogue or homologue thereof, in which:

[0882] the amino acid at Mutated site 4 is Ser, and the amino acid at Mutated site 5 is Gly.

[0883] In another preferred embodiment, the mutated PPO comprises a sequence of SEQ ID NO: 1, 2, 3, 4, 5, 6, 7, 8, 9, 10, 11, 12, 13, 14, 15, 16, 17, 18, 19, 20, 21, 22, 23, 24, 25, 26, 27, 28, 29, 30, 31, 32, 33, 34, 35, 36, 37, 38, 39, 40, 41, 42, 43, 44, 45, 46, 47, 48, 49, 50, 51, 52, 53, 54, 55, 56, 57, 58, 59, 60, 61, 62, 63, 64, 65, 66, 67, 68, 69, 70, 71, 72, 73, 74, 75, 76, 77, 78, 79, 80, 81, 82, 83, 84, 85, 86, 87, 88, 89, 90, 91, 92, 93, 94, 95, 96, 97, 98, 99, 100, 101, 102, 103, 104, 105, 106, 107, 108, 109, 110, 111, 112, 113, 114, 115, 116, 117, 118, 119, 120, 121, 122, 123, 124, 125, 126, 127, 128, 129, 130, 131, 132, 133, 134, 135, 136, 137, 138, 139, 140, 141, 142, 143, 144, 145, 146, 147, 148, 149, 150, 151, 152, 153, 154, 155, 156, 157, 158, 159, 160, 161, 162, 163, 164, 165, 166, 167, 168, 169, 170, 171, 172, 173, 174, 175, 176, 177, 178, 179, 180, 181, 182, 183, 184, 185, 186, 187, 188, 189, 190, 191, 192, 193, 194, 195, 196, 197, 198, 199, 200, 201, 202, 203, 204, 205, 206, 207, 208, 209, 210, 211, 212, 213, 214, 215, 216, 217, 218, 219, 220, 221, 222, 223, 224, 225, 226, 227, 228, 229, 230, 231, 232, 233, 234, 235, 236, 237, 238, 239, 240, 241, 242, 243, 244, 245, 246, 247, 248, 249, 250, 251, 252, 253, 254, 255, 256, 257, 258, 259, 260, 261, 262, 263, 264, 265, 266, 267, 268, 269, 270, 271, 272, 273, 274, 275, 276, 277, 278, 279, 280, 281, 282, 283, 284, 285, 286, 287, 288, 289, 290, 291, 292, 293, 294, 295, 296, 297, 298, 299, 300, 301, 312, or 313, a variant, derivative, orthologue, paralogue or homologue thereof, in which:

[0884] the amino acid at Mutated site 4 is Ser, and the amino acid at Mutated site 5 is Pro.

[0885] In another preferred embodiment, the mutated PPO comprises a sequence of SEQ ID NO: 1, 2, 3, 4, 5, 6, 7, 8, 9, 10, 11, 12, 13, 14, 15, 16, 17, 18, 19, 20, 21, 22, 23, 24, 25, 26, 27, 28, 29, 30, 31, 32, 33, 34, 35, 36, 37, 38, 39, 40, 41, 42, 43, 44, 45, 46, 47, 48, 49, 50, 51, 52, 53, 54, 55, 56, 57, 58, 59, 60, 61, 62, 63, 64, 65, 66, 67, 68, 69, 70, 71, 72, 73, 74, 75, 76, 77, 78, 79, 80, 81, 82, 83, 84, 85, 86, 87, 88, 89, 90, 91, 92, 93, 94, 95, 96, 97, 98, 99, 100, 101, 102, 103, 104, 105, 106, 107, 108, 109, 110, 111, 112, 113, 114, 115, 116, 117, 118, 119, 120, 121, 122, 123, 124, 125, 126, 127, 128, 129, 130, 131, 132, 133, 134, 135, 136, 137, 138, 139, 140, 141, 142, 143, 144, 145, 146, 147, 148, 149, 150, 151, 152, 153, 154, 155, 156, 157, 158, 159, 160, 161, 162, 163, 164, 165, 166, 167, 168, 169, 170, 171, 172, 173, 174, 175, 176, 177, 178, 179, 180, 181, 182, 183, 184, 185, 186, 187, 188, 189, 190, 191, 192, 193, 194, 195, 196, 197, 198, 199, 200, 201, 202, 203, 204, 205, 206, 207, 208, 209, 210, 211, 212, 213, 214, 215, 216, 217, 218, 219, 220, 221, 222, 223, 224, 225, 226, 227, 228, 229, 230, 231, 232, 233, 234, 235, 236, 237, 238, 239, 240, 241, 242, 243, 244, 245, 246, 247, 248, 249, 250, 251, 252, 253, 254, 255, 256, 257, 258, 259, 260, 261, 262, 263, 264, 265, 266, 267, 268, 269, 270, 271, 272, 273, 274, 275, 276, 277, 278, 279, 280, 281, 282, 283, 284, 285, 286, 287, 288, 289, 290, 291, 292, 293, 294, 295, 296, 297, 298, 299, 300, 301, 312, or 313, a variant, derivative, orthologue, paralogue or homologue thereof, in which:

[0886] the amino acid at Mutated site 4 is Ser, and the amino acid at Mutated site 5 is Arg.

[0887] In another preferred embodiment, the mutated PPO comprises a sequence of SEQ ID NO: 1, 2, 3, 4, 5, 6, 7, 8, 9, 10, 11, 12, 13, 14, 15, 16, 17, 18, 19, 20, 21, 22, 23, 24, 25, 26, 27, 28, 29, 30, 31, 32, 33, 34, 35, 36, 37, 38, 39, 40, 41, 42, 43, 44, 45, 46, 47, 48, 49, 50, 51, 52, 53, 54, 55, 56, 57, 58, 59, 60, 61, 62, 63, 64, 65, 66, 67, 68, 69, 70, 71, 72, 73, 74, 75, 76, 77, 78, 79, 80, 81, 82, 83, 84, 85, 86, 87, 88, 89, 90, 91, 92, 93, 94, 95, 96, 97, 98, 99, 100, 101, 102, 103, 104, 105, 106, 107, 108, 109, 110, 111, 112, 113, 114, 115, 116, 117, 118, 119, 120, 121, 122, 123, 124, 125, 126, 127, 128, 129, 130, 131, 132, 133, 134, 135, 136, 137, 138, 139, 140, 141, 142, 143, 144, 145, 146, 147, 148, 149, 150, 151, 152, 153, 154, 155, 156, 157, 158, 159, 160, 161, 162, 163, 164, 165, 166, 167, 168, 169, 170, 171, 172, 173, 174, 175, 176, 177, 178, 179, 180, 181, 182, 183, 184, 185, 186, 187, 188, 189, 190, 191, 192, 193, 194, 195, 196, 197, 198, 199, 200, 201, 202, 203, 204, 205, 206, 207, 208, 209, 210, 211, 212, 213, 214, 215, 216, 217, 218, 219, 220, 221, 222, 223, 224, 225, 226, 227, 228, 229, 230, 231, 232, 233, 234, 235, 236, 237, 238, 239, 240, 241, 242, 243, 244, 245, 246, 247, 248, 249, 250, 251, 252, 253, 254, 255, 256, 257, 258, 259, 260, 261, 262, 263, 264, 265, 266, 267, 268, 269, 270, 271, 272, 273, 274, 275, 276, 277, 278, 279, 280, 281, 282, 283, 284, 285, 286, 287, 288, 289, 290, 291, 292, 293, 294, 295, 296, 297, 298, 299, 300, 301, 312, or 313, a variant, derivative, orthologue, paralogue or homologue thereof, in which:

[0888] the amino acid at Mutated site 4 is Ser, and the amino acid at Mutated site 5 is Tyr.

[0889] In another preferred embodiment, the mutated PPO comprises a sequence of SEQ ID NO: 1, 2, 3, 4, 5, 6, 7, 8, 9, 10, 11, 12, 13, 14, 15, 16, 17, 18, 19, 20, 21, 22, 23, 24, 25, 26, 27, 28, 29, 30, 31, 32, 33, 34, 35, 36, 37, 38, 39, 40, 41, 42, 43, 44, 45, 46, 47, 48, 49, 50, 51, 52, 53, 54, 55, 56, 57, 58, 59, 60, 61, 62, 63, 64, 65, 66, 67, 68, 69, 70, 71, 72, 73, 74, 75, 76, 77, 78, 79, 80, 81, 82, 83, 84, 85, 86, 87, 88, 89, 90, 91, 92, 93, 94, 95, 96, 97, 98, 99, 100, 101, 102, 103, 104, 105, 106, 107, 108, 109, 110, 111, 112, 113, 114, 115, 116, 117, 118, 119, 120, 121, 122, 123, 124, 125, 126, 127, 128, 129, 130, 131, 132, 133, 134, 135, 136, 137, 138, 139, 140, 141, 142, 143, 144, 145, 146, 147, 148, 149, 150, 151, 152, 153, 154, 155, 156, 157, 158, 159, 160, 161, 162, 163, 164, 165, 166, 167, 168, 169, 170, 171, 172, 173, 174, 175, 176, 177, 178, 179, 180, 181, 182, 183, 184, 185, 186, 187, 188, 189, 190, 191, 192, 193, 194, 195, 196, 197, 198, 199, 200, 201, 202, 203, 204, 205, 206, 207, 208, 209, 210, 211, 212, 213, 214, 215, 216, 217, 218, 219, 220, 221, 222, 223, 224, 225, 226, 227, 228, 229, 230, 231, 232, 233, 234, 235, 236, 237, 238, 239, 240, 241, 242, 243, 244, 245, 246, 247, 248, 249, 250, 251, 252, 253, 254, 255, 256, 257, 258, 259, 260, 261, 262, 263, 264, 265, 266, 267, 268, 269, 270, 271, 272, 273, 274, 275, 276, 277, 278, 279, 280, 281, 282, 283, 284, 285, 286, 287, 288, 289, 290, 291, 292, 293, 294, 295, 296, 297, 298, 299, 300, 301, 312, or 313, a variant, derivative, orthologue, paralogue or homologue thereof, in which:

[0890] the amino acid at Mutated site 4 is Ser, and the amino acid at Mutated site 5 is Trp.

[0891] In another preferred embodiment, the mutated PPO comprises a sequence of SEQ ID NO: 1, 2, 3, 4, 5, 6, 7, 8, 9, 10, 11, 12, 13, 14, 15, 16, 17, 18, 19, 20, 21, 22, 23, 24, 25, 26, 27, 28, 29, 30, 31, 32, 33, 34, 35, 36, 37, 38, 39, 40, 41, 42, 43, 44, 45, 46, 47, 48, 49, 50, 51, 52, 53, 54, 55, 56, 57, 58, 59, 60, 61, 62, 63, 64, 65, 66, 67, 68, 69, 70, 71, 72, 73, 74, 75, 76, 77, 78, 79, 80, 81, 82, 83, 84, 85, 86, 87, 88, 89, 90, 91, 92, 93, 94, 95, 96, 97, 98, 99, 100, 101, 102, 103, 104, 105, 106, 107, 108, 109, 110, 111, 112, 113, 114, 115, 116, 117, 118, 119, 120, 121, 122, 123, 124, 125, 126, 127, 128, 129, 130, 131, 132, 133, 134, 135, 136, 137, 138, 139, 140, 141, 142, 143, 144, 145, 146, 147, 148, 149, 150, 151, 152, 153, 154, 155, 156, 157, 158, 159, 160, 161, 162, 163, 164, 165, 166, 167, 168, 169, 170, 171, 172, 173, 174, 175, 176, 177, 178, 179, 180, 181, 182, 183, 184, 185, 186, 187, 188, 189, 190, 191, 192, 193, 194, 195, 196, 197, 198, 199, 200, 201, 202, 203, 204, 205, 206, 207, 208, 209, 210, 211, 212, 213, 214, 215, 216, 217, 218, 219, 220, 221, 222, 223, 224, 225, 226, 227, 228, 229, 230, 231, 232, 233, 234, 235, 236, 237, 238, 239, 240, 241, 242, 243, 244, 245, 246, 247, 248, 249, 250, 251, 252, 253, 254, 255, 256, 257, 258, 259, 260, 261, 262, 263, 264, 265, 266, 267, 268, 269, 270, 271, 272, 273, 274, 275, 276, 277, 278, 279, 280, 281, 282, 283, 284, 285, 286, 287, 288, 289, 290, 291, 292, 293, 294, 295, 296, 297, 298, 299, 300, 301, 312, or 313, a variant, derivative, orthologue, paralogue or homologue thereof, in which:

[0892] the amino acid at Mutated site 4 is Thr, and the amino acid at Mutated site 5 is Ala.

[0893] In another preferred embodiment, the mutated PPO comprises a sequence of SEQ ID NO: 1, 2, 3, 4, 5, 6, 7, 8, 9, 10, 11, 12, 13, 14, 15, 16, 17, 18, 19, 20, 21, 22, 23, 24, 25, 26, 27, 28, 29, 30, 31, 32, 33, 34, 35, 36, 37, 38, 39, 40, 41, 42, 43, 44, 45, 46, 47, 48, 49, 50, 51, 52, 53, 54, 55, 56, 57, 58, 59, 60, 61, 62, 63, 64, 65, 66, 67, 68, 69, 70, 71, 72, 73, 74, 75, 76, 77, 78, 79, 80, 81, 82, 83, 84, 85, 86, 87, 88, 89, 90, 91, 92, 93, 94, 95, 96, 97, 98, 99, 100, 101, 102, 103, 104, 105, 106, 107, 108, 109, 110, 111, 112, 113, 114, 115, 116, 117, 118, 119, 120, 121, 122, 123, 124, 125, 126, 127, 128, 129, 130, 131, 132, 133, 134, 135, 136, 137, 138, 139, 140, 141, 142, 143, 144, 145, 146, 147, 148, 149, 150, 151, 152, 153, 154, 155, 156, 157, 158, 159, 160, 161, 162, 163, 164, 165, 166, 167, 168, 169, 170, 171, 172, 173, 174, 175, 176, 177, 178, 179, 180, 181, 182, 183, 184, 185, 186, 187, 188, 189, 190, 191, 192, 193, 194, 195, 196, 197, 198, 199, 200, 201, 202, 203, 204, 205, 206, 207, 208, 209, 210, 211, 212, 213, 214, 215, 216, 217, 218, 219, 220, 221, 222, 223, 224, 225, 226, 227, 228, 229, 230, 231, 232, 233, 234, 235, 236, 237, 238, 239, 240, 241, 242, 243, 244, 245, 246, 247, 248, 249, 250, 251, 252, 253, 254, 255, 256, 257, 258, 259, 260, 261, 262, 263, 264, 265, 266, 267, 268, 269, 270, 271, 272, 273, 274, 275, 276, 277, 278, 279, 280, 281, 282, 283, 284, 285, 286, 287, 288, 289, 290, 291, 292, 293, 294, 295, 296, 297, 298, 299, 300, 301, 312, or 313, a variant, derivative, orthologue, paralogue or homologue thereof, in which:

[0894] the amino acid at Mutated site 4 is Thr, and the amino acid at Mutated site 5 is Leu.

[0895] In another preferred embodiment, the mutated PPO comprises a sequence of SEQ ID NO: 1, 2, 3, 4, 5, 6, 7, 8, 9, 10, 11, 12, 13, 14, 15, 16, 17, 18, 19, 20, 21, 22, 23, 24, 25, 26, 27, 28, 29, 30, 31, 32, 33, 34, 35, 36, 37, 38, 39, 40, 41, 42, 43, 44, 45, 46, 47, 48, 49, 50, 51, 52, 53, 54, 55, 56, 57, 58, 59, 60, 61, 62, 63, 64, 65, 66, 67, 68, 69, 70, 71, 72, 73, 74, 75, 76, 77, 78, 79, 80, 81, 82, 83, 84, 85, 86, 87, 88, 89, 90, 91, 92, 93, 94, 95, 96, 97, 98, 99, 100, 101, 102, 103, 104, 105, 106, 107, 108, 109, 110, 111, 112, 113, 114, 115, 116, 117, 118, 119, 120, 121, 122, 123, 124, 125, 126, 127, 128, 129, 130, 131, 132, 133, 134, 135, 136, 137, 138, 139, 140, 141, 142, 143, 144, 145, 146, 147, 148, 149, 150, 151, 152, 153, 154, 155, 156, 157, 158, 159, 160, 161, 162, 163, 164, 165, 166, 167, 168, 169, 170, 171, 172, 173, 174, 175, 176, 177, 178, 179, 180, 181, 182, 183, 184, 185, 186, 187, 188, 189, 190, 191, 192, 193, 194, 195, 196, 197, 198, 199, 200, 201, 202, 203, 204, 205, 206, 207, 208, 209, 210, 211, 212, 213, 214, 215, 216, 217, 218, 219, 220, 221, 222, 223, 224, 225, 226, 227, 228, 229, 230, 231, 232, 233, 234, 235, 236, 237, 238, 239, 240, 241, 242, 243, 244, 245, 246, 247, 248, 249, 250, 251, 252, 253, 254, 255, 256, 257, 258, 259, 260, 261, 262, 263, 264, 265, 266, 267, 268, 269, 270, 271, 272, 273, 274, 275, 276, 277, 278, 279, 280, 281, 282, 283, 284, 285, 286, 287, 288, 289, 290, 291, 292, 293, 294, 295, 296, 297, 298, 299, 300, 301, 312, or 313, a variant, derivative, orthologue, paralogue or homologue thereof, in which:

[0896] the amino acid at Mutated site 4 is Thr, and the amino acid at Mutated site 5 is Val.

[0897] In another preferred embodiment, the mutated PPO comprises a sequence of SEQ ID NO: 1, 2, 3, 4, 5, 6, 7, 8, 9, 10, 11, 12, 13, 14, 15, 16, 17, 18, 19, 20, 21, 22, 23, 24, 25, 26, 27, 28, 29, 30, 31, 32, 33, 34, 35, 36, 37, 38, 39, 40, 41, 42, 43, 44, 45, 46, 47, 48, 49, 50, 51, 52, 53, 54, 55, 56, 57, 58, 59, 60, 61, 62, 63, 64, 65, 66, 67, 68, 69, 70, 71, 72, 73, 74, 75, 76, 77, 78, 79, 80, 81, 82, 83, 84, 85, 86, 87, 88, 89, 90, 91, 92, 93, 94, 95, 96, 97, 98, 99, 100, 101, 102, 103, 104, 105, 106, 107, 108, 109, 110, 111, 112, 113, 114, 115, 116, 117, 118, 119, 120, 121, 122, 123, 124, 125, 126, 127, 128, 129, 130, 131, 132, 133, 134, 135, 136, 137, 138, 139, 140, 141, 142, 143, 144, 145, 146, 147, 148, 149, 150, 151, 152, 153, 154, 155, 156, 157, 158, 159, 160, 161, 162, 163, 164, 165, 166, 167, 168, 169, 170, 171, 172, 173, 174, 175, 176, 177, 178, 179, 180, 181, 182, 183, 184, 185, 186, 187, 188, 189, 190, 191, 192, 193, 194, 195, 196, 197, 198, 199, 200, 201, 202, 203, 204, 205, 206, 207, 208, 209, 210, 211, 212, 213, 214, 215, 216, 217, 218, 219, 220, 221, 222, 223, 224, 225, 226, 227, 228, 229, 230, 231, 232, 233, 234, 235, 236, 237, 238, 239, 240, 241, 242, 243, 244, 245, 246, 247, 248, 249, 250, 251, 252, 253, 254, 255, 256, 257, 258, 259, 260, 261, 262, 263, 264, 265, 266, 267, 268, 269, 270, 271, 272, 273, 274, 275, 276, 277, 278, 279, 280, 281, 282, 283, 284, 285, 286, 287, 288, 289, 290, 291, 292, 293, 294, 295, 296, 297, 298, 299, 300, 301, 312, or 313, a variant, derivative, orthologue, paralogue or homologue thereof, in which:

[0898] the amino acid at Mutated site 4 is Thr, and the amino acid at Mutated site 5 is Ile.

[0899] In another preferred embodiment, the mutated PPO comprises a sequence of SEQ ID NO: 1, 2, 3, 4, 5, 6, 7, 8, 9, 10, 11, 12, 13, 14, 15, 16, 17, 18, 19, 20, 21, 22, 23, 24, 25, 26, 27, 28, 29, 30, 31, 32, 33, 34, 35, 36, 37, 38, 39, 40, 41, 42, 43, 44, 45, 46, 47, 48, 49, 50, 51, 52, 53, 54, 55, 56, 57, 58, 59, 60, 61, 62, 63, 64, 65, 66, 67, 68, 69, 70, 71, 72, 73, 74, 75, 76, 77, 78, 79, 80, 81, 82, 83, 84, 85, 86, 87, 88, 89, 90, 91, 92, 93, 94, 95, 96, 97, 98, 99, 100, 101, 102, 103, 104, 105, 106, 107, 108, 109, 110, 111, 112, 113, 114, 115, 116, 117, 118, 119, 120, 121, 122, 123, 124, 125, 126, 127, 128, 129, 130, 131, 132, 133, 134, 135, 136, 137, 138, 139, 140, 141, 142, 143, 144, 145, 146, 147, 148, 149, 150, 151, 152, 153, 154, 155, 156, 157, 158, 159, 160, 161, 162, 163, 164, 165, 166, 167, 168, 169, 170, 171, 172, 173, 174, 175, 176, 177, 178, 179, 180, 181, 182, 183, 184, 185, 186, 187, 188, 189, 190, 191, 192, 193, 194, 195, 196, 197, 198, 199, 200, 201, 202, 203, 204, 205, 206, 207, 208, 209, 210, 211, 212, 213, 214, 215, 216, 217, 218, 219, 220, 221, 222, 223, 224, 225, 226, 227, 228, 229, 230, 231, 232, 233, 234, 235, 236, 237, 238, 239, 240, 241, 242, 243, 244, 245, 246, 247, 248, 249, 250, 251, 252, 253, 254, 255, 256, 257, 258, 259, 260, 261, 262, 263, 264, 265, 266, 267, 268, 269, 270, 271, 272, 273, 274, 275, 276, 277, 278, 279, 280, 281, 282, 283, 284, 285, 286, 287, 288, 289, 290, 291, 292, 293, 294, 295, 296, 297, 298, 299, 300, 301, 312, or 313, a variant, derivative, orthologue, paralogue or homologue thereof, in which:

[0900] the amino acid at Mutated site 4 is Thr, and the amino acid at Mutated site 5 is Met.

[0901] In another preferred embodiment, the mutated PPO comprises a sequence of SEQ ID NO: 1, 2, 3, 4, 5, 6, 7, 8, 9, 10, 11, 12, 13, 14, 15, 16, 17, 18, 19, 20, 21, 22, 23, 24, 25, 26, 27, 28, 29, 30, 31, 32, 33, 34, 35, 36, 37, 38, 39, 40, 41, 42, 43, 44, 45, 46, 47, 48, 49, 50, 51, 52, 53, 54, 55, 56, 57, 58, 59, 60, 61, 62, 63, 64, 65, 66, 67, 68, 69, 70, 71, 72, 73, 74, 75, 76, 77, 78, 79, 80, 81, 82, 83, 84, 85, 86, 87, 88, 89, 90, 91, 92, 93, 94, 95, 96, 97, 98, 99, 100, 101, 102, 103, 104, 105, 106, 107, 108, 109, 110, 111, 112, 113, 114, 115, 116, 117, 118, 119, 120, 121, 122, 123, 124, 125, 126, 127, 128, 129, 130, 131, 132, 133, 134, 135, 136, 137, 138, 139, 140, 141, 142, 143, 144, 145, 146, 147, 148, 149, 150, 151, 152, 153, 154, 155, 156, 157, 158, 159, 160, 161, 162, 163, 164, 165, 166, 167, 168, 169, 170, 171, 172, 173, 174, 175, 176, 177, 178, 179, 180, 181, 182, 183, 184, 185, 186, 187, 188, 189, 190, 191, 192, 193, 194, 195, 196, 197, 198, 199, 200, 201, 202, 203, 204, 205, 206, 207, 208, 209, 210, 211, 212, 213, 214, 215, 216, 217, 218, 219, 220, 221, 222, 223, 224, 225, 226, 227, 228, 229, 230, 231, 232, 233, 234, 235, 236, 237, 238, 239, 240, 241, 242, 243, 244, 245, 246, 247, 248, 249, 250, 251, 252, 253, 254, 255, 256, 257, 258, 259, 260, 261, 262, 263, 264, 265, 266, 267, 268, 269, 270, 271, 272, 273, 274, 275, 276, 277, 278, 279, 280, 281, 282, 283, 284, 285, 286, 287, 288, 289, 290, 291, 292, 293, 294, 295, 296, 297, 298, 299, 300, 301, 312, or 313, a variant, derivative, orthologue, paralogue or homologue thereof, in which:

[0902] the amino acid at Mutated site 4 is Thr, and the amino acid at Mutated site 5 is His.

[0903] In another preferred embodiment, the mutated PPO comprises a sequence of SEQ ID NO: 1, 2, 3, 4, 5, 6, 7, 8, 9, 10, 11, 12, 13, 14, 15, 16, 17, 18, 19, 20, 21, 22, 23, 24, 25, 26, 27, 28, 29, 30, 31, 32, 33, 34, 35, 36, 37, 38, 39, 40, 41, 42, 43, 44, 45, 46, 47, 48, 49, 50, 51, 52, 53, 54, 55, 56, 57, 58, 59, 60, 61, 62, 63, 64, 65, 66, 67, 68, 69, 70, 71, 72, 73, 74, 75, 76, 77, 78, 79, 80, 81, 82, 83, 84, 85, 86, 87, 88, 89, 90, 91, 92, 93, 94, 95, 96, 97, 98, 99, 100, 101, 102, 103, 104, 105, 106, 107, 108, 109, 110, 111, 112, 113, 114, 115, 116, 117, 118, 119, 120, 121, 122, 123, 124, 125, 126, 127, 128, 129, 130, 131, 132, 133, 134, 135, 136, 137, 138, 139, 140, 141, 142, 143, 144, 145, 146, 147, 148, 149, 150, 151, 152, 153, 154, 155, 156, 157, 158, 159, 160, 161, 162, 163, 164, 165, 166, 167, 168, 169, 170, 171, 172, 173, 174, 175, 176, 177, 178, 179, 180, 181, 182, 183, 184, 185, 186, 187, 188, 189, 190, 191, 192, 193, 194, 195, 196, 197, 198, 199, 200, 201, 202, 203, 204, 205, 206, 207, 208, 209, 210, 211, 212, 213, 214, 215, 216, 217, 218, 219, 220, 221, 222, 223, 224, 225, 226, 227, 228, 229, 230, 231, 232, 233, 234, 235, 236, 237, 238, 239, 240, 241, 242, 243, 244, 245, 246, 247, 248, 249, 250, 251, 252, 253, 254, 255, 256, 257, 258, 259, 260, 261, 262, 263, 264, 265, 266, 267, 268, 269, 270, 271, 272, 273, 274, 275, 276, 277, 278, 279, 280, 281, 282, 283, 284, 285, 286, 287, 288, 289, 290, 291, 292, 293, 294, 295, 296, 297, 298, 299, 300, 301, 312, or 313, a variant, derivative, orthologue, paralogue or homologue thereof, in which:

[0904] the amino acid at Mutated site 4 is Thr, and the amino acid at Mutated site 5 is Lys.

[0905] In another preferred embodiment, the mutated PPO comprises a sequence of SEQ ID NO: 1, 2, 3, 4, 5, 6, 7, 8, 9, 10, 11, 12, 13, 14, 15, 16, 17, 18, 19, 20, 21, 22, 23, 24, 25, 26, 27, 28, 29, 30, 31, 32, 33, 34, 35, 36, 37, 38, 39, 40, 41, 42, 43, 44, 45, 46, 47, 48, 49, 50, 51, 52, 53, 54, 55, 56, 57, 58, 59, 60, 61, 62, 63, 64, 65, 66, 67, 68, 69, 70, 71, 72, 73, 74, 75, 76, 77, 78, 79, 80, 81, 82, 83, 84, 85, 86, 87, 88, 89, 90, 91, 92, 93, 94, 95, 96, 97, 98, 99, 100, 101, 102, 103, 104, 105, 106, 107, 108, 109, 110, 111, 112, 113, 114, 115, 116, 117, 118, 119, 120, 121, 122, 123, 124, 125, 126, 127, 128, 129, 130, 131, 132, 133, 134, 135, 136, 137, 138, 139, 140, 141, 142, 143, 144, 145, 146, 147, 148, 149, 150, 151, 152, 153, 154, 155, 156, 157, 158, 159, 160, 161, 162, 163, 164, 165, 166, 167, 168, 169, 170, 171, 172, 173, 174, 175, 176, 177, 178, 179, 180, 181, 182, 183, 184, 185, 186, 187, 188, 189, 190, 191, 192, 193, 194, 195, 196, 197, 198, 199, 200, 201, 202, 203, 204, 205, 206, 207, 208, 209, 210, 211, 212, 213, 214, 215, 216, 217, 218, 219, 220, 221, 222, 223, 224, 225, 226, 227, 228, 229, 230, 231, 232, 233, 234, 235, 236, 237, 238, 239, 240, 241, 242, 243, 244, 245, 246, 247, 248, 249, 250, 251, 252, 253, 254, 255, 256, 257, 258, 259, 260, 261, 262, 263, 264, 265, 266, 267, 268, 269, 270, 271, 272, 273, 274, 275, 276, 277, 278, 279, 280, 281, 282, 283, 284, 285, 286, 287, 288, 289, 290, 291, 292, 293, 294, 295, 296, 297, 298, 299, 300, 301, 312, or 313, a variant, derivative, orthologue, paralogue or homologue thereof, in which:

[0906] the amino acid at Mutated site 4 is Thr, and the amino acid at Mutated site 5 is Asp.

[0907] In another preferred embodiment, the mutated PPO comprises a sequence of SEQ ID NO: 1, 2, 3, 4, 5, 6, 7, 8, 9, 10, 11, 12, 13, 14, 15, 16, 17, 18, 19, 20, 21, 22, 23, 24, 25, 26, 27, 28, 29, 30, 31, 32, 33, 34, 35, 36, 37, 38, 39, 40, 41, 42, 43, 44, 45, 46, 47, 48, 49, 50, 51, 52, 53, 54, 55, 56, 57, 58, 59, 60, 61, 62, 63, 64, 65, 66, 67, 68, 69, 70, 71, 72, 73, 74, 75, 76, 77, 78, 79, 80, 81, 82, 83, 84, 85, 86, 87, 88, 89, 90, 91, 92, 93, 94, 95, 96, 97, 98, 99, 100, 101, 102, 103, 104, 105, 106, 107, 108, 109, 110, 111, 112, 113, 114, 115, 116, 117, 118, 119, 120, 121, 122, 123, 124, 125, 126, 127, 128, 129, 130, 131, 132, 133, 134, 135, 136, 137, 138, 139, 140, 141, 142, 143, 144, 145, 146, 147, 148, 149, 150, 151, 152, 153, 154, 155, 156, 157, 158, 159, 160, 161, 162, 163, 164, 165, 166, 167, 168, 169, 170, 171, 172, 173, 174, 175, 176, 177, 178, 179, 180, 181, 182, 183, 184, 185, 186, 187, 188, 189, 190, 191, 192, 193, 194, 195, 196, 197, 198, 199, 200, 201, 202, 203, 204, 205, 206, 207, 208, 209, 210, 211, 212, 213, 214, 215, 216, 217, 218, 219, 220, 221, 222, 223, 224, 225, 226, 227, 228, 229, 230, 231, 232, 233, 234, 235, 236, 237, 238, 239, 240, 241, 242, 243, 244, 245, 246, 247, 248, 249, 250, 251, 252, 253, 254, 255, 256, 257, 258, 259, 260, 261, 262, 263, 264, 265, 266, 267, 268, 269, 270, 271, 272, 273, 274, 275, 276, 277, 278, 279, 280, 281, 282, 283, 284, 285, 286, 287, 288, 289, 290, 291, 292, 293, 294, 295, 296, 297, 298, 299, 300, 301, 312, or 313, a variant, derivative, orthologue, paralogue or homologue thereof, in which:

[0908] the amino acid at Mutated site 4 is Thr, and the amino acid at Mutated site 5 is Glu.

[0909] In another preferred embodiment, the mutated PPO comprises a sequence of SEQ ID NO: 1, 2, 3, 4, 5, 6, 7, 8, 9, 10, 11, 12, 13, 14, 15, 16, 17, 18, 19, 20, 21, 22, 23, 24, 25, 26, 27, 28, 29, 30, 31, 32, 33, 34, 35, 36, 37, 38, 39, 40, 41, 42, 43, 44, 45, 46, 47, 48, 49, 50, 51, 52, 53, 54, 55, 56, 57, 58, 59, 60, 61, 62, 63, 64, 65, 66, 67, 68, 69, 70, 71, 72, 73, 74, 75, 76, 77, 78, 79, 80, 81, 82, 83, 84, 85, 86, 87, 88, 89, 90, 91, 92, 93, 94, 95, 96, 97, 98, 99, 100, 101, 102, 103, 104, 105, 106, 107, 108, 109, 110, 111, 112, 113, 114, 115, 116, 117, 118, 119, 120, 121, 122, 123, 124, 125, 126, 127, 128, 129, 130, 131, 132, 133, 134, 135, 136, 137, 138, 139, 140, 141, 142, 143, 144, 145, 146, 147, 148, 149, 150, 151, 152, 153, 154, 155, 156, 157, 158, 159, 160, 161, 162, 163, 164, 165, 166, 167, 168, 169, 170, 171, 172, 173, 174, 175, 176, 177, 178, 179, 180, 181, 182, 183, 184, 185, 186, 187, 188, 189, 190, 191, 192, 193, 194, 195, 196, 197, 198, 199, 200, 201, 202, 203, 204, 205, 206, 207, 208, 209, 210, 211, 212, 213, 214, 215, 216, 217, 218, 219, 220, 221, 222, 223, 224, 225, 226, 227, 228, 229, 230, 231, 232, 233, 234, 235, 236, 237, 238, 239, 240, 241, 242, 243, 244, 245, 246, 247, 248, 249, 250, 251, 252, 253, 254, 255, 256, 257, 258, 259, 260, 261, 262, 263, 264, 265, 266, 267, 268, 269, 270, 271, 272, 273, 274, 275, 276, 277, 278, 279, 280, 281, 282, 283, 284, 285, 286, 287, 288, 289, 290, 291, 292, 293, 294, 295, 296, 297, 298, 299, 300, 301, 312, or 313, a variant, derivative, orthologue, paralogue or homologue thereof, in which:

[0910] the amino acid at Mutated site 4 is Thr, and the amino acid at Mutated site 5 is Ser.

[0911] In another preferred embodiment, the mutated PPO comprises a sequence of SEQ ID NO: 1, 2, 3, 4, 5, 6, 7, 8, 9, 10, 11, 12, 13, 14, 15, 16, 17, 18, 19, 20, 21, 22, 23, 24, 25, 26, 27, 28, 29, 30, 31, 32, 33, 34, 35, 36, 37, 38, 39, 40, 41, 42, 43, 44, 45, 46, 47, 48, 49, 50, 51, 52, 53, 54, 55, 56, 57, 58, 59, 60, 61, 62, 63, 64, 65, 66, 67, 68, 69, 70, 71, 72, 73, 74, 75, 76, 77, 78, 79, 80, 81, 82, 83, 84, 85, 86, 87, 88, 89, 90, 91, 92, 93, 94, 95, 96, 97, 98, 99, 100, 101, 102, 103, 104, 105, 106, 107, 108, 109, 110, 111, 112, 113, 114, 115, 116, 117, 118, 119, 120, 121, 122, 123, 124, 125, 126, 127, 128, 129, 130, 131, 132, 133, 134, 135, 136, 137, 138, 139, 140, 141, 142, 143, 144, 145, 146, 147, 148, 149, 150, 151, 152, 153, 154, 155, 156, 157, 158, 159, 160, 161, 162, 163, 164, 165, 166, 167, 168, 169, 170, 171, 172, 173, 174, 175, 176, 177, 178, 179, 180, 181, 182, 183, 184, 185, 186, 187, 188, 189, 190, 191, 192, 193, 194, 195, 196, 197, 198, 199, 200, 201, 202, 203, 204, 205, 206, 207, 208, 209, 210, 211, 212, 213, 214, 215, 216, 217, 218, 219, 220, 221, 222, 223, 224, 225, 226, 227, 228, 229, 230, 231, 232, 233, 234, 235, 236, 237, 238, 239, 240, 241, 242, 243, 244, 245, 246, 247, 248, 249, 250, 251, 252, 253, 254, 255, 256, 257, 258, 259, 260, 261, 262, 263, 264, 265, 266, 267, 268, 269, 270, 271, 272, 273, 274, 275, 276, 277, 278, 279, 280, 281, 282, 283, 284, 285, 286, 287, 288, 289, 290, 291, 292, 293, 294, 295, 296, 297, 298, 299, 300, 301, 312, or 313, a variant, derivative, orthologue, paralogue or homologue thereof, in which:

[0912] the amino acid at Mutated site 4 is Thr, and the amino acid at Mutated site 5 is Thr.

[0913] In another preferred embodiment, the mutated PPO comprises a sequence of SEQ ID NO: 1, 2, 3, 4, 5, 6, 7, 8, 9, 10, 11, 12, 13, 14, 15, 16, 17, 18, 19, 20, 21, 22, 23, 24, 25, 26, 27, 28, 29, 30, 31, 32, 33, 34, 35, 36, 37, 38, 39, 40, 41, 42, 43, 44, 45, 46, 47, 48, 49, 50, 51, 52, 53, 54, 55, 56, 57, 58, 59, 60, 61, 62, 63, 64, 65, 66, 67, 68, 69, 70, 71, 72, 73, 74, 75, 76, 77, 78, 79, 80, 81, 82, 83, 84, 85, 86, 87, 88, 89, 90, 91, 92, 93, 94, 95, 96, 97, 98, 99, 100, 101, 102, 103, 104, 105, 106, 107, 108, 109, 110, 111, 112, 113, 114, 115, 116, 117, 118, 119, 120, 121, 122, 123, 124, 125, 126, 127, 128, 129, 130, 131, 132, 133, 134, 135, 136, 137, 138, 139, 140, 141, 142, 143, 144, 145, 146, 147, 148, 149, 150, 151, 152, 153, 154, 155, 156, 157, 158, 159, 160, 161, 162, 163, 164, 165, 166, 167, 168, 169, 170, 171, 172, 173, 174, 175, 176, 177, 178, 179, 180, 181, 182, 183, 184, 185, 186, 187, 188, 189, 190, 191, 192, 193, 194, 195, 196, 197, 198, 199, 200, 201, 202, 203, 204, 205, 206, 207, 208, 209, 210, 211, 212, 213, 214, 215, 216, 217, 218, 219, 220, 221, 222, 223, 224, 225, 226, 227, 228, 229, 230, 231, 232, 233, 234, 235, 236, 237, 238, 239, 240, 241, 242, 243, 244, 245, 246, 247, 248, 249, 250, 251, 252, 253, 254, 255, 256, 257, 258, 259, 260, 261, 262, 263, 264, 265, 266, 267, 268, 269, 270, 271, 272, 273, 274, 275, 276, 277, 278, 279, 280, 281, 282, 283, 284, 285, 286, 287, 288, 289, 290, 291, 292, 293, 294, 295, 296, 297, 298, 299, 300, 301, 312, or 313, a variant, derivative, orthologue, paralogue or homologue thereof, in which:

[0914] the amino acid at Mutated site 4 is Thr, and the amino acid at Mutated site 5 is Asn.

[0915] In another preferred embodiment, the mutated PPO comprises a sequence of SEQ ID NO: 1, 2, 3, 4, 5, 6, 7, 8, 9, 10, 11, 12, 13, 14, 15, 16, 17, 18, 19, 20, 21, 22, 23, 24, 25, 26, 27, 28, 29, 30, 31, 32, 33, 34, 35, 36, 37, 38, 39, 40, 41, 42, 43, 44, 45, 46, 47, 48, 49, 50, 51, 52, 53, 54, 55, 56, 57, 58, 59, 60, 61, 62, 63, 64, 65, 66, 67, 68, 69, 70, 71, 72, 73, 74, 75, 76, 77, 78, 79, 80, 81, 82, 83, 84, 85, 86, 87, 88, 89, 90, 91, 92, 93, 94, 95, 96, 97, 98, 99, 100, 101, 102, 103, 104, 105, 106, 107, 108, 109, 110, 111, 112, 113, 114, 115, 116, 117, 118, 119, 120, 121, 122, 123, 124, 125, 126, 127, 128, 129, 130, 131, 132, 133, 134, 135, 136, 137, 138, 139, 140, 141, 142, 143, 144, 145, 146, 147, 148, 149, 150, 151, 152, 153, 154, 155, 156, 157, 158, 159, 160, 161, 162, 163, 164, 165, 166, 167, 168, 169, 170, 171, 172, 173, 174, 175, 176, 177, 178, 179, 180, 181, 182, 183, 184, 185, 186, 187, 188, 189, 190, 191, 192, 193, 194, 195, 196, 197, 198, 199, 200, 201, 202, 203, 204, 205, 206, 207, 208, 209, 210, 211, 212, 213, 214, 215, 216, 217, 218, 219, 220, 221, 222, 223, 224, 225, 226, 227, 228, 229, 230, 231, 232, 233, 234, 235, 236, 237, 238, 239, 240, 241, 242, 243, 244, 245, 246, 247, 248, 249, 250, 251, 252, 253, 254, 255, 256, 257, 258, 259, 260, 261, 262, 263, 264, 265, 266, 267, 268, 269, 270, 271, 272, 273, 274, 275, 276, 277, 278, 279, 280, 281, 282, 283, 284, 285, 286, 287, 288, 289, 290, 291, 292, 293, 294, 295, 296, 297, 298, 299, 300, 301, 312, or 313, a variant, derivative, orthologue, paralogue or homologue thereof, in which:

[0916] the amino acid at Mutated site 4 is Thr, and the amino acid at Mutated site 5 is Gin.

[0917] In another preferred embodiment, the mutated PPO comprises a sequence of SEQ ID NO: 1, 2, 3, 4, 5, 6, 7, 8, 9, 10, 11, 12, 13, 14, 15, 16, 17, 18, 19, 20, 21, 22, 23, 24, 25, 26, 27, 28, 29, 30, 31, 32, 33, 34, 35, 36, 37, 38, 39, 40, 41, 42, 43, 44, 45, 46, 47, 48, 49, 50, 51, 52, 53, 54, 55, 56, 57, 58, 59, 60, 61, 62, 63, 64, 65, 66, 67, 68, 69, 70, 71, 72, 73, 74, 75, 76, 77, 78, 79, 80, 81, 82, 83, 84, 85, 86, 87, 88, 89, 90, 91, 92, 93, 94, 95, 96, 97, 98, 99, 100, 101, 102, 103, 104, 105, 106, 107, 108, 109, 110, 111, 112, 113, 114, 115, 116, 117, 118, 119, 120, 121, 122, 123, 124, 125, 126, 127, 128, 129, 130, 131, 132, 133, 134, 135, 136, 137, 138, 139, 140, 141, 142, 143, 144, 145, 146, 147, 148, 149, 150, 151, 152, 153, 154, 155, 156, 157, 158, 159, 160, 161, 162, 163, 164, 165, 166, 167, 168, 169, 170, 171, 172, 173, 174, 175, 176, 177, 178, 179, 180, 181, 182, 183, 184, 185, 186, 187, 188, 189, 190, 191, 192, 193, 194, 195, 196, 197, 198, 199, 200, 201, 202, 203, 204, 205, 206, 207, 208, 209, 210, 211, 212, 213, 214, 215, 216, 217, 218, 219, 220, 221, 222, 223, 224, 225, 226, 227, 228, 229, 230, 231, 232, 233, 234, 235, 236, 237, 238, 239, 240, 241, 242, 243, 244, 245, 246, 247, 248, 249, 250, 251, 252, 253, 254, 255, 256, 257, 258, 259, 260, 261, 262, 263, 264, 265, 266, 267, 268, 269, 270, 271, 272, 273, 274, 275, 276, 277, 278, 279, 280, 281, 282, 283, 284, 285, 286, 287, 288, 289, 290, 291, 292, 293, 294, 295, 296, 297, 298, 299, 300, 301, 312, or 313, a variant, derivative, orthologue, paralogue or homologue thereof, in which:

[0918] the amino acid at Mutated site 4 is Thr, and the amino acid at Mutated site 5 is Cys.

[0919] In another preferred embodiment, the mutated PPO comprises a sequence of SEQ ID NO: 1, 2, 3, 4, 5, 6, 7, 8, 9, 10, 11, 12, 13, 14, 15, 16, 17, 18, 19, 20, 21, 22, 23, 24, 25, 26, 27, 28, 29, 30, 31, 32, 33, 34, 35, 36, 37, 38, 39, 40, 41, 42, 43, 44, 45, 46, 47, 48, 49, 50, 51, 52, 53, 54, 55, 56, 57, 58, 59, 60, 61, 62, 63, 64, 65, 66, 67, 68, 69, 70, 71, 72, 73, 74, 75, 76, 77, 78, 79, 80, 81, 82, 83, 84, 85, 86, 87, 88, 89, 90, 91, 92, 93, 94, 95, 96, 97, 98, 99, 100, 101, 102, 103, 104, 105, 106, 107, 108, 109, 110, 111, 112, 113, 114, 115, 116, 117, 118, 119, 120, 121, 122, 123, 124, 125, 126, 127, 128, 129, 130, 131, 132, 133, 134, 135, 136, 137, 138, 139, 140, 141, 142, 143, 144, 145, 146, 147, 148, 149, 150, 151, 152, 153, 154, 155, 156, 157, 158, 159, 160, 161, 162, 163, 164, 165, 166, 167, 168, 169, 170, 171, 172, 173, 174, 175, 176, 177, 178, 179, 180, 181, 182, 183, 184, 185, 186, 187, 188, 189, 190, 191, 192, 193, 194, 195, 196, 197, 198, 199, 200, 201, 202, 203, 204, 205, 206, 207, 208, 209, 210, 211, 212, 213, 214, 215, 216, 217, 218, 219, 220, 221, 222, 223, 224, 225, 226, 227, 228, 229, 230, 231, 232, 233, 234, 235, 236, 237, 238, 239, 240, 241, 242, 243, 244, 245, 246, 247, 248, 249, 250, 251, 252, 253, 254, 255, 256, 257, 258, 259, 260, 261, 262, 263, 264, 265, 266, 267, 268, 269, 270, 271, 272, 273, 274, 275, 276, 277, 278, 279, 280, 281, 282, 283, 284, 285, 286, 287, 288, 289, 290, 291, 292, 293, 294, 295, 296, 297, 298, 299, 300, 301, 312, or 313, a variant, derivative, orthologue, paralogue or homologue thereof, in which:

[0920] the amino acid at Mutated site 4 is Thr, and the amino acid at Mutated site 5 is Gly.

[0921] In another preferred embodiment, the mutated PPO comprises a sequence of SEQ ID NO: 1, 2, 3, 4, 5, 6, 7, 8, 9, 10, 11, 12, 13, 14, 15, 16, 17, 18, 19, 20, 21, 22, 23, 24, 25, 26, 27, 28, 29, 30, 31, 32, 33, 34, 35, 36, 37, 38, 39, 40, 41, 42, 43, 44, 45, 46, 47, 48, 49, 50, 51, 52, 53, 54, 55, 56, 57, 58, 59, 60, 61, 62, 63, 64, 65, 66, 67, 68, 69, 70, 71, 72, 73, 74, 75, 76, 77, 78, 79, 80, 81, 82, 83, 84, 85, 86, 87, 88, 89, 90, 91, 92, 93, 94, 95, 96, 97, 98, 99, 100, 101, 102, 103, 104, 105, 106, 107, 108, 109, 110, 111, 112, 113, 114, 115, 116, 117, 118, 119, 120, 121, 122, 123, 124, 125, 126, 127, 128, 129, 130, 131, 132, 133, 134, 135, 136, 137, 138, 139, 140, 141, 142, 143, 144, 145, 146, 147, 148, 149, 150, 151, 152, 153, 154, 155, 156, 157, 158, 159, 160, 161, 162, 163, 164, 165, 166, 167, 168, 169, 170, 171, 172, 173, 174, 175, 176, 177, 178, 179, 180, 181, 182, 183, 184, 185, 186, 187, 188, 189, 190, 191, 192, 193, 194, 195, 196, 197, 198, 199, 200, 201, 202, 203, 204, 205, 206, 207, 208, 209, 210, 211, 212, 213, 214, 215, 216, 217, 218, 219, 220, 221, 222, 223, 224, 225, 226, 227, 228, 229, 230, 231, 232, 233, 234, 235, 236, 237, 238, 239, 240, 241, 242, 243, 244, 245, 246, 247, 248, 249, 250, 251, 252, 253, 254, 255, 256, 257, 258, 259, 260, 261, 262, 263, 264, 265, 266, 267, 268, 269, 270, 271, 272, 273, 274, 275, 276, 277, 278, 279, 280, 281, 282, 283, 284, 285, 286, 287, 288, 289, 290, 291, 292, 293, 294, 295, 296, 297, 298, 299, 300, 301, 312, or 313, a variant, derivative, orthologue, paralogue or homologue thereof, in which:

[0922] the amino acid at Mutated site 4 is Thr, and the amino acid at Mutated site 5 is Pro.

[0923] In another preferred embodiment, the mutated PPO comprises a sequence of SEQ ID NO: 1, 2, 3, 4, 5, 6, 7, 8, 9, 10, 11, 12, 13, 14, 15, 16, 17, 18, 19, 20, 21, 22, 23, 24, 25, 26, 27, 28, 29, 30, 31, 32, 33, 34, 35, 36, 37, 38, 39, 40, 41, 42, 43, 44, 45, 46, 47, 48, 49, 50, 51, 52, 53, 54, 55, 56, 57, 58, 59, 60, 61, 62, 63, 64, 65, 66, 67, 68, 69, 70, 71, 72, 73, 74, 75, 76, 77, 78, 79, 80, 81, 82, 83, 84, 85, 86, 87, 88, 89, 90, 91, 92, 93, 94, 95, 96, 97, 98, 99, 100, 101, 102, 103, 104, 105, 106, 107, 108, 109, 110, 111, 112, 113, 114, 115, 116, 117, 118, 119, 120, 121, 122, 123, 124, 125, 126, 127, 128, 129, 130, 131, 132, 133, 134, 135, 136, 137, 138, 139, 140, 141, 142, 143, 144, 145, 146, 147, 148, 149, 150, 151, 152, 153, 154, 155, 156, 157, 158, 159, 160, 161, 162, 163, 164, 165, 166, 167, 168, 169, 170, 171, 172, 173, 174, 175, 176, 177, 178, 179, 180, 181, 182, 183, 184, 185, 186, 187, 188, 189, 190, 191, 192, 193, 194, 195, 196, 197, 198, 199, 200, 201, 202, 203, 204, 205, 206, 207, 208, 209, 210, 211, 212, 213, 214, 215, 216, 217, 218, 219, 220, 221, 222, 223, 224, 225, 226, 227, 228, 229, 230, 231, 232, 233, 234, 235, 236, 237, 238, 239, 240, 241, 242, 243, 244, 245, 246, 247, 248, 249, 250, 251, 252, 253, 254, 255, 256, 257, 258, 259, 260, 261, 262, 263, 264, 265, 266, 267, 268, 269, 270, 271, 272, 273, 274, 275, 276, 277, 278, 279, 280, 281, 282, 283, 284, 285, 286, 287, 288, 289, 290, 291, 292, 293, 294, 295, 296, 297, 298, 299, 300, 301, 312, or 313, a variant, derivative, orthologue, paralogue or homologue thereof, in which:

[0924] the amino acid at Mutated site 4 is Thr, and the amino acid at Mutated site 5 is Arg.

[0925] In another preferred embodiment, the mutated PPO comprises a sequence of SEQ ID NO: 1, 2, 3, 4, 5, 6, 7, 8, 9, 10, 11, 12, 13, 14, 15, 16, 17, 18, 19, 20, 21, 22, 23, 24, 25, 26, 27, 28, 29, 30, 31, 32, 33, 34, 35, 36, 37, 38, 39, 40, 41, 42, 43, 44, 45, 46, 47, 48, 49, 50, 51, 52, 53, 54, 55, 56, 57, 58, 59, 60, 61, 62, 63, 64, 65, 66, 67, 68, 69, 70, 71, 72, 73, 74, 75, 76, 77, 78, 79, 80, 81, 82, 83, 84, 85, 86, 87, 88, 89, 90, 91, 92, 93, 94, 95, 96, 97, 98, 99, 100, 101, 102, 103, 104, 105, 106, 107, 108, 109, 110, 111, 112, 113, 114, 115, 116, 117, 118, 119, 120, 121, 122, 123, 124, 125, 126, 127, 128, 129, 130, 131, 132, 133, 134, 135, 136, 137, 138, 139, 140, 141, 142, 143, 144, 145, 146, 147, 148, 149, 150, 151, 152, 153, 154, 155, 156, 157, 158, 159, 160, 161, 162, 163, 164, 165, 166, 167, 168, 169, 170, 171, 172, 173, 174, 175, 176, 177, 178, 179, 180, 181, 182, 183, 184, 185, 186, 187, 188, 189, 190, 191, 192, 193, 194, 195, 196, 197, 198, 199, 200, 201, 202, 203, 204, 205, 206, 207, 208, 209, 210, 211, 212, 213, 214, 215, 216, 217, 218, 219, 220, 221, 222, 223, 224, 225, 226, 227, 228, 229, 230, 231, 232, 233, 234, 235, 236, 237, 238, 239, 240, 241, 242, 243, 244, 245, 246, 247, 248, 249, 250, 251, 252, 253, 254, 255, 256, 257, 258, 259, 260, 261, 262, 263, 264, 265, 266, 267, 268, 269, 270, 271, 272, 273, 274, 275, 276, 277, 278, 279, 280, 281, 282, 283, 284, 285, 286, 287, 288, 289, 290, 291, 292, 293, 294, 295, 296, 297, 298, 299, 300, 301, 312, or 313, a variant, derivative, orthologue, paralogue or homologue thereof, in which:

[0926] the amino acid at Mutated site 4 is Thr, and the amino acid at Mutated site 5 is Tyr.

[0927] In another preferred embodiment, the mutated PPO comprises a sequence of SEQ ID NO: 1, 2, 3, 4, 5, 6, 7, 8, 9, 10, 11, 12, 13, 14, 15, 16, 17, 18, 19, 20, 21, 22, 23, 24, 25, 26, 27, 28, 29, 30, 31, 32, 33, 34, 35, 36, 37, 38, 39, 40, 41, 42, 43, 44, 45, 46, 47, 48, 49, 50, 51, 52, 53, 54, 55, 56, 57, 58, 59, 60, 61, 62, 63, 64, 65, 66, 67, 68, 69, 70, 71, 72, 73, 74, 75, 76, 77, 78, 79, 80, 81, 82, 83, 84, 85, 86, 87, 88, 89, 90, 91, 92, 93, 94, 95, 96, 97, 98, 99, 100, 101, 102, 103, 104, 105, 106, 107, 108, 109, 110, 111, 112, 113, 114, 115, 116, 117, 118, 119, 120, 121, 122, 123, 124, 125, 126, 127, 128, 129, 130, 131, 132, 133, 134, 135, 136, 137, 138, 139, 140, 141, 142, 143, 144, 145, 146, 147, 148, 149, 150, 151, 152, 153, 154, 155, 156, 157, 158, 159, 160, 161, 162, 163, 164, 165, 166, 167, 168, 169, 170, 171, 172, 173, 174, 175, 176, 177, 178, 179, 180, 181, 182, 183, 184, 185, 186, 187, 188, 189, 190, 191, 192, 193, 194, 195, 196, 197, 198, 199, 200, 201, 202, 203, 204, 205, 206, 207, 208, 209, 210, 211, 212, 213, 214, 215, 216, 217, 218, 219, 220, 221, 222, 223, 224, 225, 226, 227, 228, 229, 230, 231, 232, 233, 234, 235, 236, 237, 238, 239, 240, 241, 242, 243, 244, 245, 246, 247, 248, 249, 250, 251, 252, 253, 254, 255, 256, 257, 258, 259, 260, 261, 262, 263, 264, 265, 266, 267, 268, 269, 270, 271, 272, 273, 274, 275, 276, 277, 278, 279, 280, 281, 282, 283, 284, 285, 286, 287, 288, 289, 290, 291, 292, 293, 294, 295, 296, 297, 298, 299, 300, 301, 312, or 313, a variant, derivative, orthologue, paralogue or homologue thereof, in which:

[0928] the amino acid at Mutated site 4 is Thr, and the amino acid at Mutated site 5 is Trp.

[0929] In another preferred embodiment, the mutated PPO comprises a sequence of SEQ ID NO: 1, 2, 3, 4, 5, 6, 7, 8, 9, 10, 11, 12, 13, 14, 15, 16, 17, 18, 19, 20, 21, 22, 23, 24, 25, 26, 27, 28, 29, 30, 31, 32, 33, 34, 35, 36, 37, 38, 39, 40, 41, 42, 43, 44, 45, 46, 47, 48, 49, 50, 51, 52, 53, 54, 55, 56, 57, 58, 59, 60, 61, 62, 63, 64, 65, 66, 67, 68, 69, 70, 71, 72, 73, 74, 75, 76, 77, 78, 79, 80, 81, 82, 83, 84, 85, 86, 87, 88, 89, 90, 91, 92, 93, 94, 95, 96, 97, 98, 99, 100, 101, 102, 103, 104, 105, 106, 107, 108, 109, 110, 111, 112, 113, 114, 115, 116, 117, 118, 119, 120, 121, 122, 123, 124, 125, 126, 127, 128, 129, 130, 131, 132, 133, 134, 135, 136, 137, 138, 139, 140, 141, 142, 143, 144, 145, 146, 147, 148, 149, 150, 151, 152, 153, 154, 155, 156, 157, 158, 159, 160, 161, 162, 163, 164, 165, 166, 167, 168, 169, 170, 171, 172, 173, 174, 175, 176, 177, 178, 179, 180, 181, 182, 183, 184, 185, 186, 187, 188, 189, 190, 191, 192, 193, 194, 195, 196, 197, 198, 199, 200, 201, 202, 203, 204, 205, 206, 207, 208, 209, 210, 211, 212, 213, 214, 215, 216, 217, 218, 219, 220, 221, 222, 223, 224, 225, 226, 227, 228, 229, 230, 231, 232, 233, 234, 235, 236, 237, 238, 239, 240, 241, 242, 243, 244, 245, 246, 247, 248, 249, 250, 251, 252, 253, 254, 255, 256, 257, 258, 259, 260, 261, 262, 263, 264, 265, 266, 267, 268, 269, 270, 271, 272, 273, 274, 275, 276, 277, 278, 279, 280, 281, 282, 283, 284, 285, 286, 287, 288, 289, 290, 291, 292, 293, 294, 295, 296, 297, 298, 299, 300, 301, 312, or 313, a variant, derivative, orthologue, paralogue or homologue thereof, in which:

[0930] the amino acid at Mutated site 4 is Asn, and the amino acid at Mutated site 5 is Ala.

[0931] In another preferred embodiment, the mutated PPO comprises a sequence of SEQ ID NO: 1, 2, 3, 4, 5, 6, 7, 8, 9, 10, 11, 12, 13, 14, 15, 16, 17, 18, 19, 20, 21, 22, 23, 24, 25, 26, 27, 28, 29, 30, 31, 32, 33, 34, 35, 36, 37, 38, 39, 40, 41, 42, 43, 44, 45, 46, 47, 48, 49, 50, 51, 52, 53, 54, 55, 56, 57, 58, 59, 60, 61, 62, 63, 64, 65, 66, 67, 68, 69, 70, 71, 72, 73, 74, 75, 76, 77, 78, 79, 80, 81, 82, 83, 84, 85, 86, 87, 88, 89, 90, 91, 92, 93, 94, 95, 96, 97, 98, 99, 100, 101, 102, 103, 104, 105, 106, 107, 108, 109, 110, 111, 112, 113, 114, 115, 116, 117, 118, 119, 120, 121, 122, 123, 124, 125, 126, 127, 128, 129, 130, 131, 132, 133, 134, 135, 136, 137, 138, 139, 140, 141, 142, 143, 144, 145, 146, 147, 148, 149, 150, 151, 152, 153, 154, 155, 156, 157, 158, 159, 160, 161, 162, 163, 164, 165, 166, 167, 168, 169, 170, 171, 172, 173, 174, 175, 176, 177, 178, 179, 180, 181, 182, 183, 184, 185, 186, 187, 188, 189, 190, 191, 192, 193, 194, 195, 196, 197, 198, 199, 200, 201, 202, 203, 204, 205, 206, 207, 208, 209, 210, 211, 212, 213, 214, 215, 216, 217, 218, 219, 220, 221, 222, 223, 224, 225, 226, 227, 228, 229, 230, 231, 232, 233, 234, 235, 236, 237, 238, 239, 240, 241, 242, 243, 244, 245, 246, 247, 248, 249, 250, 251, 252, 253, 254, 255, 256, 257, 258, 259, 260, 261, 262, 263, 264, 265, 266, 267, 268, 269, 270, 271, 272, 273, 274, 275, 276, 277, 278, 279, 280, 281, 282, 283, 284, 285, 286, 287, 288, 289, 290, 291, 292, 293, 294, 295, 296, 297, 298, 299, 300, 301, 312, or 313, a variant, derivative, orthologue, paralogue or homologue thereof, in which:

[0932] the amino acid at Mutated site 4 is Asn, and the amino acid at Mutated site 5 is Leu.

[0933] In another preferred embodiment, the mutated PPO comprises a sequence of SEQ ID NO: 1, 2, 3, 4, 5, 6, 7, 8, 9, 10, 11, 12, 13, 14, 15, 16, 17, 18, 19, 20, 21, 22, 23, 24, 25, 26, 27, 28, 29, 30, 31, 32, 33, 34, 35, 36, 37, 38, 39, 40, 41, 42, 43, 44, 45, 46, 47, 48, 49, 50, 51, 52, 53, 54, 55, 56, 57, 58, 59, 60, 61, 62, 63, 64, 65, 66, 67, 68, 69, 70, 71, 72, 73, 74, 75, 76, 77, 78, 79, 80, 81, 82, 83, 84, 85, 86, 87, 88, 89, 90, 91, 92, 93, 94, 95, 96, 97, 98, 99, 100, 101, 102, 103, 104, 105, 106, 107, 108, 109, 110, 111, 112, 113, 114, 115, 116, 117, 118, 119, 120, 121, 122, 123, 124, 125, 126, 127, 128, 129, 130, 131, 132, 133, 134, 135, 136, 137, 138, 139, 140, 141, 142, 143, 144, 145, 146, 147, 148, 149, 150, 151, 152, 153, 154, 155, 156, 157, 158, 159, 160, 161, 162, 163, 164, 165, 166, 167, 168, 169, 170, 171, 172, 173, 174, 175, 176, 177, 178, 179, 180, 181, 182, 183, 184, 185, 186, 187, 188, 189, 190, 191, 192, 193, 194, 195, 196, 197, 198, 199, 200, 201, 202, 203, 204, 205, 206, 207, 208, 209, 210, 211, 212, 213, 214, 215, 216, 217, 218, 219, 220, 221, 222, 223, 224, 225, 226, 227, 228, 229, 230, 231, 232, 233, 234, 235, 236, 237, 238, 239, 240, 241, 242, 243, 244, 245, 246, 247, 248, 249, 250, 251, 252, 253, 254, 255, 256, 257, 258, 259, 260, 261, 262, 263, 264, 265, 266, 267, 268, 269, 270, 271, 272, 273, 274, 275, 276, 277, 278, 279, 280, 281, 282, 283, 284, 285, 286, 287, 288, 289, 290, 291, 292, 293, 294, 295, 296, 297, 298, 299, 300, 301, 312, or 313, a variant, derivative, orthologue, paralogue or homologue thereof, in which:

[0934] the amino acid at Mutated site 4 is Asn, and the amino acid at Mutated site 5 is Val.

[0935] In another preferred embodiment, the mutated PPO comprises a sequence of SEQ ID NO: 1, 2, 3, 4, 5, 6, 7, 8, 9, 10, 11, 12, 13, 14, 15, 16, 17, 18, 19, 20, 21, 22, 23, 24, 25, 26, 27, 28, 29, 30, 31, 32, 33, 34, 35, 36, 37, 38, 39, 40, 41, 42, 43, 44, 45, 46, 47, 48, 49, 50, 51, 52, 53, 54, 55, 56, 57, 58, 59, 60, 61, 62, 63, 64, 65, 66, 67, 68, 69, 70, 71, 72, 73, 74, 75, 76, 77, 78, 79, 80, 81, 82, 83, 84, 85, 86, 87, 88, 89, 90, 91, 92, 93, 94, 95, 96, 97, 98, 99, 100, 101, 102, 103, 104, 105, 106, 107, 108, 109, 110, 111, 112, 113, 114, 115, 116, 117, 118, 119, 120, 121, 122, 123, 124, 125, 126, 127, 128, 129, 130, 131, 132, 133, 134, 135, 136, 137, 138, 139, 140, 141, 142, 143, 144, 145, 146, 147, 148, 149, 150, 151, 152, 153, 154, 155, 156, 157, 158, 159, 160, 161, 162, 163, 164, 165, 166, 167, 168, 169, 170, 171, 172, 173, 174, 175, 176, 177, 178, 179, 180, 181, 182, 183, 184, 185, 186, 187, 188, 189, 190, 191, 192, 193, 194, 195, 196, 197, 198, 199, 200, 201, 202, 203, 204, 205, 206, 207, 208, 209, 210, 211, 212, 213, 214, 215, 216, 217, 218, 219, 220, 221, 222, 223, 224, 225, 226, 227, 228, 229, 230, 231, 232, 233, 234, 235, 236, 237, 238, 239, 240, 241, 242, 243, 244, 245, 246, 247, 248, 249, 250, 251, 252, 253, 254, 255, 256, 257, 258, 259, 260, 261, 262, 263, 264, 265, 266, 267, 268, 269, 270, 271, 272, 273, 274, 275, 276, 277, 278, 279, 280, 281, 282, 283, 284, 285, 286, 287, 288, 289, 290, 291, 292, 293, 294, 295, 296, 297, 298, 299, 300, 301, 312, or 313, a variant, derivative, orthologue, paralogue or homologue thereof, in which:

[0936] the amino acid at Mutated site 4 is Asn, and the amino acid at Mutated site 5 is Ile.

[0937] In another preferred embodiment, the mutated PPO comprises a sequence of SEQ ID NO: 1, 2, 3, 4, 5, 6, 7, 8, 9, 10, 11, 12, 13, 14, 15, 16, 17, 18, 19, 20, 21, 22, 23, 24, 25, 26, 27, 28, 29, 30, 31, 32, 33, 34, 35, 36, 37, 38, 39, 40, 41, 42, 43, 44, 45, 46, 47, 48, 49, 50, 51, 52, 53, 54, 55, 56, 57, 58, 59, 60, 61, 62, 63, 64, 65, 66, 67, 68, 69, 70, 71, 72, 73, 74, 75, 76, 77, 78, 79, 80, 81, 82, 83, 84, 85, 86, 87, 88, 89, 90, 91, 92, 93, 94, 95, 96, 97, 98, 99, 100, 101, 102, 103, 104, 105, 106, 107, 108, 109, 110, 111, 112, 113, 114, 115, 116, 117, 118, 119, 120, 121, 122, 123, 124, 125, 126, 127, 128, 129, 130, 131, 132, 133, 134, 135, 136, 137, 138, 139, 140, 141, 142, 143, 144, 145, 146, 147, 148, 149, 150, 151, 152, 153, 154, 155, 156, 157, 158, 159, 160, 161, 162, 163, 164, 165, 166, 167, 168, 169, 170, 171, 172, 173, 174, 175, 176, 177, 178, 179, 180, 181, 182, 183, 184, 185, 186, 187, 188, 189, 190, 191, 192, 193, 194, 195, 196, 197, 198, 199, 200, 201, 202, 203, 204, 205, 206, 207, 208, 209, 210, 211, 212, 213, 214, 215, 216, 217, 218, 219, 220, 221, 222, 223, 224, 225, 226, 227, 228, 229, 230, 231, 232, 233, 234, 235, 236, 237, 238, 239, 240, 241, 242, 243, 244, 245, 246, 247, 248, 249, 250, 251, 252, 253, 254, 255, 256, 257, 258, 259, 260, 261, 262, 263, 264, 265, 266, 267, 268, 269, 270, 271, 272, 273, 274, 275, 276, 277, 278, 279, 280, 281, 282, 283, 284, 285, 286, 287, 288, 289, 290, 291, 292, 293, 294, 295, 296, 297, 298, 299, 300, 301, 312, or 313, a variant, derivative, orthologue, paralogue or homologue thereof, in which:

[0938] the amino acid at Mutated site 4 is Asn, and the amino acid at Mutated site 5 is Met.

[0939] In another preferred embodiment, the mutated PPO comprises a sequence of SEQ ID NO: 1, 2, 3, 4, 5, 6, 7, 8, 9, 10, 11, 12, 13, 14, 15, 16, 17, 18, 19, 20, 21, 22, 23, 24, 25, 26, 27, 28, 29, 30, 31, 32, 33, 34, 35, 36, 37, 38, 39, 40, 41, 42, 43, 44, 45, 46, 47, 48, 49, 50, 51, 52, 53, 54, 55, 56, 57, 58, 59, 60, 61, 62, 63, 64, 65, 66, 67, 68, 69, 70, 71, 72, 73, 74, 75, 76, 77, 78, 79, 80, 81, 82, 83, 84, 85, 86, 87, 88, 89, 90, 91, 92, 93, 94, 95, 96, 97, 98, 99, 100, 101, 102, 103, 104, 105, 106, 107, 108, 109, 110, 111, 112, 113, 114, 115, 116, 117, 118, 119, 120, 121, 122, 123, 124, 125, 126, 127, 128, 129, 130, 131, 132, 133, 134, 135, 136, 137, 138, 139, 140, 141, 142, 143, 144, 145, 146, 147, 148, 149, 150, 151, 152, 153, 154, 155, 156, 157, 158, 159, 160, 161, 162, 163, 164, 165, 166, 167, 168, 169, 170, 171, 172, 173, 174, 175, 176, 177, 178, 179, 180, 181, 182, 183, 184, 185, 186, 187, 188, 189, 190, 191, 192, 193, 194, 195, 196, 197, 198, 199, 200, 201, 202, 203, 204, 205, 206, 207, 208, 209, 210, 211, 212, 213, 214, 215, 216, 217, 218, 219, 220, 221, 222, 223, 224, 225, 226, 227, 228, 229, 230, 231, 232, 233, 234, 235, 236, 237, 238, 239, 240, 241, 242, 243, 244, 245, 246, 247, 248, 249, 250, 251, 252, 253, 254, 255, 256, 257, 258, 259, 260, 261, 262, 263, 264, 265, 266, 267, 268, 269, 270, 271, 272, 273, 274, 275, 276, 277, 278, 279, 280, 281, 282, 283, 284, 285, 286, 287, 288, 289, 290, 291, 292, 293, 294, 295, 296, 297, 298, 299, 300, 301, 312, or 313, a variant, derivative, orthologue, paralogue or homologue thereof, in which:

[0940] the amino acid at Mutated site 4 is Asn, and the amino acid at Mutated site 5 is His.

[0941] In another preferred embodiment, the mutated PPO comprises a sequence of SEQ ID NO: 1, 2, 3, 4, 5, 6, 7, 8, 9, 10, 11, 12, 13, 14, 15, 16, 17, 18, 19, 20, 21, 22, 23, 24, 25, 26, 27, 28, 29, 30, 31, 32, 33, 34, 35, 36, 37, 38, 39, 40, 41, 42, 43, 44, 45, 46, 47, 48, 49, 50, 51, 52, 53, 54, 55, 56, 57, 58, 59, 60, 61, 62, 63, 64, 65, 66, 67, 68, 69, 70, 71, 72, 73, 74, 75, 76, 77, 78, 79, 80, 81, 82, 83, 84, 85, 86, 87, 88, 89, 90, 91, 92, 93, 94, 95, 96, 97, 98, 99, 100, 101, 102, 103, 104, 105, 106, 107, 108, 109, 110, 111, 112, 113, 114, 115, 116, 117, 118, 119, 120, 121, 122, 123, 124, 125, 126, 127, 128, 129, 130, 131, 132, 133, 134, 135, 136, 137, 138, 139, 140, 141, 142, 143, 144, 145, 146, 147, 148, 149, 150, 151, 152, 153, 154, 155, 156, 157, 158, 159, 160, 161, 162, 163, 164, 165, 166, 167, 168, 169, 170, 171, 172, 173, 174, 175, 176, 177, 178, 179, 180, 181, 182, 183, 184, 185, 186, 187, 188, 189, 190, 191, 192, 193, 194, 195, 196, 197, 198, 199, 200, 201, 202, 203, 204, 205, 206, 207, 208, 209, 210, 211, 212, 213, 214, 215, 216, 217, 218, 219, 220, 221, 222, 223, 224, 225, 226, 227, 228, 229, 230, 231, 232, 233, 234, 235, 236, 237, 238, 239, 240, 241, 242, 243, 244, 245, 246, 247, 248, 249, 250, 251, 252, 253, 254, 255, 256, 257, 258, 259, 260, 261, 262, 263, 264, 265, 266, 267, 268, 269, 270, 271, 272, 273, 274, 275, 276, 277, 278, 279, 280, 281, 282, 283, 284, 285, 286, 287, 288, 289, 290, 291, 292, 293, 294, 295, 296, 297, 298, 299, 300, 301, 312, or 313, a variant, derivative, orthologue, paralogue or homologue thereof, in which:

[0942] the amino acid at Mutated site 4 is Asn, and the amino acid at Mutated site 5 is Lys.

[0943] In another preferred embodiment, the mutated PPO comprises a sequence of SEQ ID NO: 1, 2, 3, 4, 5, 6, 7, 8, 9, 10, 11, 12, 13, 14, 15, 16, 17, 18, 19, 20, 21, 22, 23, 24, 25, 26, 27, 28, 29, 30, 31, 32, 33, 34, 35, 36, 37, 38, 39, 40, 41, 42, 43, 44, 45, 46, 47, 48, 49, 50, 51, 52, 53, 54, 55, 56, 57, 58, 59, 60, 61, 62, 63, 64, 65, 66, 67, 68, 69, 70, 71, 72, 73, 74, 75, 76, 77, 78, 79, 80, 81, 82, 83, 84, 85, 86, 87, 88, 89, 90, 91, 92, 93, 94, 95, 96, 97, 98, 99, 100, 101, 102, 103, 104, 105, 106, 107, 108, 109, 110, 111, 112, 113, 114, 115, 116, 117, 118, 119, 120, 121, 122, 123, 124, 125, 126, 127, 128, 129, 130, 131, 132, 133, 134, 135, 136, 137, 138, 139, 140, 141, 142, 143, 144, 145, 146, 147, 148, 149, 150, 151, 152, 153, 154, 155, 156, 157, 158, 159, 160, 161, 162, 163, 164, 165, 166, 167, 168, 169, 170, 171, 172, 173, 174, 175, 176, 177, 178, 179, 180, 181, 182, 183, 184, 185, 186, 187, 188, 189, 190, 191, 192, 193, 194, 195, 196, 197, 198, 199, 200, 201, 202, 203, 204, 205, 206, 207, 208, 209, 210, 211, 212, 213, 214, 215, 216, 217, 218, 219, 220, 221, 222, 223, 224, 225, 226, 227, 228, 229, 230, 231, 232, 233, 234, 235, 236, 237, 238, 239, 240, 241, 242, 243, 244, 245, 246, 247, 248, 249, 250, 251, 252, 253, 254, 255, 256, 257, 258, 259, 260, 261, 262, 263, 264, 265, 266, 267, 268, 269, 270, 271, 272, 273, 274, 275, 276, 277, 278, 279, 280, 281, 282, 283, 284, 285, 286, 287, 288, 289, 290, 291, 292, 293, 294, 295, 296, 297, 298, 299, 300, 301, 312, or 313, a variant, derivative, orthologue, paralogue or homologue thereof, in which:

[0944] the amino acid at Mutated site 4 is Asn, and the amino acid at Mutated site 5 is Asp.

[0945] In another preferred embodiment, the mutated PPO comprises a sequence of SEQ ID NO: 1, 2, 3, 4, 5, 6, 7, 8, 9, 10, 11, 12, 13, 14, 15, 16, 17, 18, 19, 20, 21, 22, 23, 24, 25, 26, 27, 28, 29, 30, 31, 32, 33, 34, 35, 36, 37, 38, 39, 40, 41, 42, 43, 44, 45, 46, 47, 48, 49, 50, 51, 52, 53, 54, 55, 56, 57, 58, 59, 60, 61, 62, 63, 64, 65, 66, 67, 68, 69, 70, 71, 72, 73, 74, 75, 76, 77, 78, 79, 80, 81, 82, 83, 84, 85, 86, 87, 88, 89, 90, 91, 92, 93, 94, 95, 96, 97, 98, 99, 100, 101, 102, 103, 104, 105, 106, 107, 108, 109, 110, 111, 112, 113, 114, 115, 116, 117, 118, 119, 120, 121, 122, 123, 124, 125, 126, 127, 128, 129, 130, 131, 132, 133, 134, 135, 136, 137, 138, 139, 140, 141, 142, 143, 144, 145, 146, 147, 148, 149, 150, 151, 152, 153, 154, 155, 156, 157, 158, 159, 160, 161, 162, 163, 164, 165, 166, 167, 168, 169, 170, 171, 172, 173, 174, 175, 176, 177, 178, 179, 180, 181, 182, 183, 184, 185, 186, 187, 188, 189, 190, 191, 192, 193, 194, 195, 196, 197, 198, 199, 200, 201, 202, 203, 204, 205, 206, 207, 208, 209, 210, 211, 212, 213, 214, 215, 216, 217, 218, 219, 220, 221, 222, 223, 224, 225, 226, 227, 228, 229, 230, 231, 232, 233, 234, 235, 236, 237, 238, 239, 240, 241, 242, 243, 244, 245, 246, 247, 248, 249, 250, 251, 252, 253, 254, 255, 256, 257, 258, 259, 260, 261, 262, 263, 264, 265, 266, 267, 268, 269, 270, 271, 272, 273, 274, 275, 276, 277, 278, 279, 280, 281, 282, 283, 284, 285, 286, 287, 288, 289, 290, 291, 292, 293, 294, 295, 296, 297, 298, 299, 300, 301, 312, or 313, a variant, derivative, orthologue, paralogue or homologue thereof, in which:

[0946] the amino acid at Mutated site 4 is Asn, and the amino acid at Mutated site 5 is Glu.

[0947] In another preferred embodiment, the mutated PPO comprises a sequence of SEQ ID NO: 1, 2, 3, 4, 5, 6, 7, 8, 9, 10, 11, 12, 13, 14, 15, 16, 17, 18, 19, 20, 21, 22, 23, 24, 25, 26, 27, 28, 29, 30, 31, 32, 33, 34, 35, 36, 37, 38, 39, 40, 41, 42, 43, 44, 45, 46, 47, 48, 49, 50, 51, 52, 53, 54, 55, 56, 57, 58, 59, 60, 61, 62, 63, 64, 65, 66, 67, 68, 69, 70, 71, 72, 73, 74, 75, 76, 77, 78, 79, 80, 81, 82, 83, 84, 85, 86, 87, 88, 89, 90, 91, 92, 93, 94, 95, 96, 97, 98, 99, 100, 101, 102, 103, 104, 105, 106, 107, 108, 109, 110, 111, 112, 113, 114, 115, 116, 117, 118, 119, 120, 121, 122, 123, 124, 125, 126, 127, 128, 129, 130, 131, 132, 133, 134, 135, 136, 137, 138, 139, 140, 141, 142, 143, 144, 145, 146, 147, 148, 149, 150, 151, 152, 153, 154, 155, 156, 157, 158, 159, 160, 161, 162, 163, 164, 165, 166, 167, 168, 169, 170, 171, 172, 173, 174, 175, 176, 177, 178, 179, 180, 181, 182, 183, 184, 185, 186, 187, 188, 189, 190, 191, 192, 193, 194, 195, 196, 197, 198, 199, 200, 201, 202, 203, 204, 205, 206, 207, 208, 209, 210, 211, 212, 213, 214, 215, 216, 217, 218, 219, 220, 221, 222, 223, 224, 225, 226, 227, 228, 229, 230, 231, 232, 233, 234, 235, 236, 237, 238, 239, 240, 241, 242, 243, 244, 245, 246, 247, 248, 249, 250, 251, 252, 253, 254, 255, 256, 257, 258, 259, 260, 261, 262, 263, 264, 265, 266, 267, 268, 269, 270, 271, 272, 273, 274, 275, 276, 277, 278, 279, 280, 281, 282, 283, 284, 285, 286, 287, 288, 289, 290, 291, 292, 293, 294, 295, 296, 297, 298, 299, 300, 301, 312, or 313, a variant, derivative, orthologue, paralogue or homologue thereof, in which:

[0948] the amino acid at Mutated site 4 is Asn, and the amino acid at Mutated site 5 is Ser.

[0949] In another preferred embodiment, the mutated PPO comprises a sequence of SEQ ID NO: 1, 2, 3, 4, 5, 6, 7, 8, 9, 10, 11, 12, 13, 14, 15, 16, 17, 18, 19, 20, 21, 22, 23, 24, 25, 26, 27, 28, 29, 30, 31, 32, 33, 34, 35, 36, 37, 38, 39, 40, 41, 42, 43, 44, 45, 46, 47, 48, 49, 50, 51, 52, 53, 54, 55, 56, 57, 58, 59, 60, 61, 62, 63, 64, 65, 66, 67, 68, 69, 70, 71, 72, 73, 74, 75, 76, 77, 78, 79, 80, 81, 82, 83, 84, 85, 86, 87, 88, 89, 90, 91, 92, 93, 94, 95, 96, 97, 98, 99, 100, 101, 102, 103, 104, 105, 106, 107, 108, 109, 110, 111, 112, 113, 114, 115, 116, 117, 118, 119, 120, 121, 122, 123, 124, 125, 126, 127, 128, 129, 130, 131, 132, 133, 134, 135, 136, 137, 138, 139, 140, 141, 142, 143, 144, 145, 146, 147, 148, 149, 150, 151, 152, 153, 154, 155, 156, 157, 158, 159, 160, 161, 162, 163, 164, 165, 166, 167, 168, 169, 170, 171, 172, 173, 174, 175, 176, 177, 178, 179, 180, 181, 182, 183, 184, 185, 186, 187, 188, 189, 190, 191, 192, 193, 194, 195, 196, 197, 198, 199, 200, 201, 202, 203, 204, 205, 206, 207, 208, 209, 210, 211, 212, 213, 214, 215, 216, 217, 218, 219, 220, 221, 222, 223, 224, 225, 226, 227, 228, 229, 230, 231, 232, 233, 234, 235, 236, 237, 238, 239, 240, 241, 242, 243, 244, 245, 246, 247, 248, 249, 250, 251, 252, 253, 254, 255, 256, 257, 258, 259, 260, 261, 262, 263, 264, 265, 266, 267, 268, 269, 270, 271, 272, 273, 274, 275, 276, 277, 278, 279, 280, 281, 282, 283, 284, 285, 286, 287, 288, 289, 290, 291, 292, 293, 294, 295, 296, 297, 298, 299, 300, 301, 312, or 313, a variant, derivative, orthologue, paralogue or homologue thereof, in which:

[0950] the amino acid at Mutated site 4 is Asn, and the amino acid at Mutated site 5 is Thr.

[0951] In another preferred embodiment, the mutated PPO comprises a sequence of SEQ ID NO: 1, 2, 3, 4, 5, 6, 7, 8, 9, 10, 11, 12, 13, 14, 15, 16, 17, 18, 19, 20, 21, 22, 23, 24, 25, 26, 27, 28, 29, 30, 31, 32, 33, 34, 35, 36, 37, 38, 39, 40, 41, 42, 43, 44, 45, 46, 47, 48, 49, 50, 51, 52, 53, 54, 55, 56, 57, 58, 59, 60, 61, 62, 63, 64, 65, 66, 67, 68, 69, 70, 71, 72, 73, 74, 75, 76, 77, 78, 79, 80, 81, 82, 83, 84, 85, 86, 87, 88, 89, 90, 91, 92, 93, 94, 95, 96, 97, 98, 99, 100, 101, 102, 103, 104, 105, 106, 107, 108, 109, 110, 111, 112, 113, 114, 115, 116, 117, 118, 119, 120, 121, 122, 123, 124, 125, 126, 127, 128, 129, 130, 131, 132, 133, 134, 135, 136, 137, 138, 139, 140, 141, 142, 143, 144, 145, 146, 147, 148, 149, 150, 151, 152, 153, 154, 155, 156, 157, 158, 159, 160, 161, 162, 163, 164, 165, 166, 167, 168, 169, 170, 171, 172, 173, 174, 175, 176, 177, 178, 179, 180, 181, 182, 183, 184, 185, 186, 187, 188, 189, 190, 191, 192, 193, 194, 195, 196, 197, 198, 199, 200, 201, 202, 203, 204, 205, 206, 207, 208, 209, 210, 211, 212, 213, 214, 215, 216, 217, 218, 219, 220, 221, 222, 223, 224, 225, 226, 227, 228, 229, 230, 231, 232, 233, 234, 235, 236, 237, 238, 239, 240, 241, 242, 243, 244, 245, 246, 247, 248, 249, 250, 251, 252, 253, 254, 255, 256, 257, 258, 259, 260, 261, 262, 263, 264, 265, 266, 267, 268, 269, 270, 271, 272, 273, 274, 275, 276, 277, 278, 279, 280, 281, 282, 283, 284, 285, 286, 287, 288, 289, 290, 291, 292, 293, 294, 295, 296, 297, 298, 299, 300, 301, 312, or 313, a variant, derivative, orthologue, paralogue or homologue thereof, in which:

[0952] the amino acid at Mutated site 4 is Asn, and the amino acid at Mutated site 5 is Asn.

[0953] In another preferred embodiment, the mutated PPO comprises a sequence of SEQ ID NO: 1, 2, 3, 4, 5, 6, 7, 8, 9, 10, 11, 12, 13, 14, 15, 16, 17, 18, 19, 20, 21, 22, 23, 24, 25, 26, 27, 28, 29, 30, 31, 32, 33, 34, 35, 36, 37, 38, 39, 40, 41, 42, 43, 44, 45, 46, 47, 48, 49, 50, 51, 52, 53, 54, 55, 56, 57, 58, 59, 60, 61, 62, 63, 64, 65, 66, 67, 68, 69, 70, 71, 72, 73, 74, 75, 76, 77, 78, 79, 80, 81, 82, 83, 84, 85, 86, 87, 88, 89, 90, 91, 92, 93, 94, 95, 96, 97, 98, 99, 100, 101, 102, 103, 104, 105, 106, 107, 108, 109, 110, 111, 112, 113, 114, 115, 116, 117, 118, 119, 120, 121, 122, 123, 124, 125, 126, 127, 128, 129, 130, 131, 132, 133, 134, 135, 136, 137, 138, 139, 140, 141, 142, 143, 144, 145, 146, 147, 148, 149, 150, 151, 152, 153, 154, 155, 156, 157, 158, 159, 160, 161, 162, 163, 164, 165, 166, 167, 168, 169, 170, 171, 172, 173, 174, 175, 176, 177, 178, 179, 180, 181, 182, 183, 184, 185, 186, 187, 188, 189, 190, 191, 192, 193, 194, 195, 196, 197, 198, 199, 200, 201, 202, 203, 204, 205, 206, 207, 208, 209, 210, 211, 212, 213, 214, 215, 216, 217, 218, 219, 220, 221, 222, 223, 224, 225, 226, 227, 228, 229, 230, 231, 232, 233, 234, 235, 236, 237, 238, 239, 240, 241, 242, 243, 244, 245, 246, 247, 248, 249, 250, 251, 252, 253, 254, 255, 256, 257, 258, 259, 260, 261, 262, 263, 264, 265, 266, 267, 268, 269, 270, 271, 272, 273, 274, 275, 276, 277, 278, 279, 280, 281, 282, 283, 284, 285, 286, 287, 288, 289, 290, 291, 292, 293, 294, 295, 296, 297, 298, 299, 300, 301, 312, or 313, a variant, derivative, orthologue, paralogue or homologue thereof, in which:

[0954] the amino acid at Mutated site 4 is Asn, and the amino acid at Mutated site 5 is Gln.

[0955] In another preferred embodiment, the mutated PPO comprises a sequence of SEQ ID NO: 1, 2, 3, 4, 5, 6, 7, 8, 9, 10, 11, 12, 13, 14, 15, 16, 17, 18, 19, 20, 21, 22, 23, 24, 25, 26, 27, 28, 29, 30, 31, 32, 33, 34, 35, 36, 37, 38, 39, 40, 41, 42, 43, 44, 45, 46, 47, 48, 49, 50, 51, 52, 53, 54, 55, 56, 57, 58, 59, 60, 61, 62, 63, 64, 65, 66, 67, 68, 69, 70, 71, 72, 73, 74, 75, 76, 77, 78, 79, 80, 81, 82, 83, 84, 85, 86, 87, 88, 89, 90, 91, 92, 93, 94, 95, 96, 97, 98, 99, 100, 101, 102, 103, 104, 105, 106, 107, 108, 109, 110, 111, 112, 113, 114, 115, 116, 117, 118, 119, 120, 121, 122, 123, 124, 125, 126, 127, 128, 129, 130, 131, 132, 133, 134, 135, 136, 137, 138, 139, 140, 141, 142, 143, 144, 145, 146, 147, 148, 149, 150, 151, 152, 153, 154, 155, 156, 157, 158, 159, 160, 161, 162, 163, 164, 165, 166, 167, 168, 169, 170, 171, 172, 173, 174, 175, 176, 177, 178, 179, 180, 181, 182, 183, 184, 185, 186, 187, 188, 189, 190, 191, 192, 193, 194, 195, 196, 197, 198, 199, 200, 201, 202, 203, 204, 205, 206, 207, 208, 209, 210, 211, 212, 213, 214, 215, 216, 217, 218, 219, 220, 221, 222, 223, 224, 225, 226, 227, 228, 229, 230, 231, 232, 233, 234, 235, 236, 237, 238, 239, 240, 241, 242, 243, 244, 245, 246, 247, 248, 249, 250, 251, 252, 253, 254, 255, 256, 257, 258, 259, 260, 261, 262, 263, 264, 265, 266, 267, 268, 269, 270, 271, 272, 273, 274, 275, 276, 277, 278, 279, 280, 281, 282, 283, 284, 285, 286, 287, 288, 289, 290, 291, 292, 293, 294, 295, 296, 297, 298, 299, 300, 301, 312, or 313, a variant, derivative, orthologue, paralogue or homologue thereof, in which:

[0956] the amino acid at Mutated site 4 is Asn, and the amino acid at Mutated site 5 is Cys.

[0957] In another preferred embodiment, the mutated PPO comprises a sequence of SEQ ID NO: 1, 2, 3, 4, 5, 6, 7, 8, 9, 10, 11, 12, 13, 14, 15, 16, 17, 18, 19, 20, 21, 22, 23, 24, 25, 26, 27, 28, 29, 30, 31, 32, 33, 34, 35, 36, 37, 38, 39, 40, 41, 42, 43, 44, 45, 46, 47, 48, 49, 50, 51, 52, 53, 54, 55, 56, 57, 58, 59, 60, 61, 62, 63, 64, 65, 66, 67, 68, 69, 70, 71, 72, 73, 74, 75, 76, 77, 78, 79, 80, 81, 82, 83, 84, 85, 86, 87, 88, 89, 90, 91, 92, 93, 94, 95, 96, 97, 98, 99, 100, 101, 102, 103, 104, 105, 106, 107, 108, 109, 110, 111, 112, 113, 114, 115, 116, 117, 118, 119, 120, 121, 122, 123, 124, 125, 126, 127, 128, 129, 130, 131, 132, 133, 134, 135, 136, 137, 138, 139, 140, 141, 142, 143, 144, 145, 146, 147, 148, 149, 150, 151, 152, 153, 154, 155, 156, 157, 158, 159, 160, 161, 162, 163, 164, 165, 166, 167, 168, 169, 170, 171, 172, 173, 174, 175, 176, 177, 178, 179, 180, 181, 182, 183, 184, 185, 186, 187, 188, 189, 190, 191, 192, 193, 194, 195, 196, 197, 198, 199, 200, 201, 202, 203, 204, 205, 206, 207, 208, 209, 210, 211, 212, 213, 214, 215, 216, 217, 218, 219, 220, 221, 222, 223, 224, 225, 226, 227, 228, 229, 230, 231, 232, 233, 234, 235, 236, 237, 238, 239, 240, 241, 242, 243, 244, 245, 246, 247, 248, 249, 250, 251, 252, 253, 254, 255, 256, 257, 258, 259, 260, 261, 262, 263, 264, 265, 266, 267, 268, 269, 270, 271, 272, 273, 274, 275, 276, 277, 278, 279, 280, 281, 282, 283, 284, 285, 286, 287, 288, 289, 290, 291, 292, 293, 294, 295, 296, 297, 298, 299, 300, 301, 312, or 313, a variant, derivative, orthologue, paralogue or homologue thereof, in which:

[0958] the amino acid at Mutated site 4 is Asn, and the amino acid at Mutated site 5 is Gly.

[0959] In another preferred embodiment, the mutated PPO comprises a sequence of SEQ ID NO: 1, 2, 3, 4, 5, 6, 7, 8, 9, 10, 11, 12, 13, 14, 15, 16, 17, 18, 19, 20, 21, 22, 23, 24, 25, 26, 27, 28, 29, 30, 31, 32, 33, 34, 35, 36, 37, 38, 39, 40, 41, 42, 43, 44, 45, 46, 47, 48, 49, 50, 51, 52, 53, 54, 55, 56, 57, 58, 59, 60, 61, 62, 63, 64, 65, 66, 67, 68, 69, 70, 71, 72, 73, 74, 75, 76, 77, 78, 79, 80, 81, 82, 83, 84, 85, 86, 87, 88, 89, 90, 91, 92, 93, 94, 95, 96, 97, 98, 99, 100, 101, 102, 103, 104, 105, 106, 107, 108, 109, 110, 111, 112, 113, 114, 115, 116, 117, 118, 119, 120, 121, 122, 123, 124, 125, 126, 127, 128, 129, 130, 131, 132, 133, 134, 135, 136, 137, 138, 139, 140, 141, 142, 143, 144, 145, 146, 147, 148, 149, 150, 151, 152, 153, 154, 155, 156, 157, 158, 159, 160, 161, 162, 163, 164, 165, 166, 167, 168, 169, 170, 171, 172, 173, 174, 175, 176, 177, 178, 179, 180, 181, 182, 183, 184, 185, 186, 187, 188, 189, 190, 191, 192, 193, 194, 195, 196, 197, 198, 199, 200, 201, 202, 203, 204, 205, 206, 207, 208, 209, 210, 211, 212, 213, 214, 215, 216, 217, 218, 219, 220, 221, 222, 223, 224, 225, 226, 227, 228, 229, 230, 231, 232, 233, 234, 235, 236, 237, 238, 239, 240, 241, 242, 243, 244, 245, 246, 247, 248, 249, 250, 251, 252, 253, 254, 255, 256, 257, 258, 259, 260, 261, 262, 263, 264, 265, 266, 267, 268, 269, 270, 271, 272, 273, 274, 275, 276, 277, 278, 279, 280, 281, 282, 283, 284, 285, 286, 287, 288, 289, 290, 291, 292, 293, 294, 295, 296, 297, 298, 299, 300, 301, 312, or 313, a variant, derivative, orthologue, paralogue or homologue thereof, in which:

[0960] the amino acid at Mutated site 4 is Asn, and the amino acid at Mutated site 5 is Pro.

[0961] In another preferred embodiment, the mutated PPO comprises a sequence of SEQ ID NO: 1, 2, 3, 4, 5, 6, 7, 8, 9, 10, 11, 12, 13, 14, 15, 16, 17, 18, 19, 20, 21, 22, 23, 24, 25, 26, 27, 28, 29, 30, 31, 32, 33, 34, 35, 36, 37, 38, 39, 40, 41, 42, 43, 44, 45, 46, 47, 48, 49, 50, 51, 52, 53, 54, 55, 56, 57, 58, 59, 60, 61, 62, 63, 64, 65, 66, 67, 68, 69, 70, 71, 72, 73, 74, 75, 76, 77, 78, 79, 80, 81, 82, 83, 84, 85, 86, 87, 88, 89, 90, 91, 92, 93, 94, 95, 96, 97, 98, 99, 100, 101, 102, 103, 104, 105, 106, 107, 108, 109, 110, 111, 112, 113, 114, 115, 116, 117, 118, 119, 120, 121, 122, 123, 124, 125, 126, 127, 128, 129, 130, 131, 132, 133, 134, 135, 136, 137, 138, 139, 140, 141, 142, 143, 144, 145, 146, 147, 148, 149, 150, 151, 152, 153, 154, 155, 156, 157, 158, 159, 160, 161, 162, 163, 164, 165, 166, 167, 168, 169, 170, 171, 172, 173, 174, 175, 176, 177, 178, 179, 180, 181, 182, 183, 184, 185, 186, 187, 188, 189, 190, 191, 192, 193, 194, 195, 196, 197, 198, 199, 200, 201, 202, 203, 204, 205, 206, 207, 208, 209, 210, 211, 212, 213, 214, 215, 216, 217, 218, 219, 220, 221, 222, 223, 224, 225, 226, 227, 228, 229, 230, 231, 232, 233, 234, 235, 236, 237, 238, 239, 240, 241, 242, 243, 244, 245, 246, 247, 248, 249, 250, 251, 252, 253, 254, 255, 256, 257, 258, 259, 260, 261, 262, 263, 264, 265, 266, 267, 268, 269, 270, 271, 272, 273, 274, 275, 276, 277, 278, 279, 280, 281, 282, 283, 284, 285, 286, 287, 288, 289, 290, 291, 292, 293, 294, 295, 296, 297, 298, 299, 300, 301, 312, or 313, a variant, derivative, orthologue, paralogue or homologue thereof, in which:

[0962] the amino acid at Mutated site 4 is Asn, and the amino acid at Mutated site 5 is Arg.

[0963] In another preferred embodiment, the mutated PPO comprises a sequence of SEQ ID NO: 1, 2, 3, 4, 5, 6, 7, 8, 9, 10, 11, 12, 13, 14, 15, 16, 17, 18, 19, 20, 21, 22, 23, 24, 25, 26, 27, 28, 29, 30, 31, 32, 33, 34, 35, 36, 37, 38, 39, 40, 41, 42, 43, 44, 45, 46, 47, 48, 49, 50, 51, 52, 53, 54, 55, 56, 57, 58, 59, 60, 61, 62, 63, 64, 65, 66, 67, 68, 69, 70, 71, 72, 73, 74, 75, 76, 77, 78, 79, 80, 81, 82, 83, 84, 85, 86, 87, 88, 89, 90, 91, 92, 93, 94, 95, 96, 97, 98, 99, 100, 101, 102, 103, 104, 105, 106, 107, 108, 109, 110, 111, 112, 113, 114, 115, 116, 117, 118, 119, 120, 121, 122, 123, 124, 125, 126, 127, 128, 129, 130, 131, 132, 133, 134, 135, 136, 137, 138, 139, 140, 141, 142, 143, 144, 145, 146, 147, 148, 149, 150, 151, 152, 153, 154, 155, 156, 157, 158, 159, 160, 161, 162, 163, 164, 165, 166, 167, 168, 169, 170, 171, 172, 173, 174, 175, 176, 177, 178, 179, 180, 181, 182, 183, 184, 185, 186, 187, 188, 189, 190, 191, 192, 193, 194, 195, 196, 197, 198, 199, 200, 201, 202, 203, 204, 205, 206, 207, 208, 209, 210, 211, 212, 213, 214, 215, 216, 217, 218, 219, 220, 221, 222, 223, 224, 225, 226, 227, 228, 229, 230, 231, 232, 233, 234, 235, 236, 237, 238, 239, 240, 241, 242, 243, 244, 245, 246, 247, 248, 249, 250, 251, 252, 253, 254, 255, 256, 257, 258, 259, 260, 261, 262, 263, 264, 265, 266, 267, 268, 269, 270, 271, 272, 273, 274, 275, 276, 277, 278, 279, 280, 281, 282, 283, 284, 285, 286, 287, 288, 289, 290, 291, 292, 293, 294, 295, 296, 297, 298, 299, 300, 301, 312, or 313, a variant, derivative, orthologue, paralogue or homologue thereof, in which:

[0964] the amino acid at Mutated site 4 is Asn, and the amino acid at Mutated site 5 is Tyr.

[0965] In another preferred embodiment, the mutated PPO comprises a sequence of SEQ ID NO: 1, 2, 3, 4, 5, 6, 7, 8, 9, 10, 11, 12, 13, 14, 15, 16, 17, 18, 19, 20, 21, 22, 23, 24, 25, 26, 27, 28, 29, 30, 31, 32, 33, 34, 35, 36, 37, 38, 39, 40, 41, 42, 43, 44, 45, 46, 47, 48, 49, 50, 51, 52, 53, 54, 55, 56, 57, 58, 59, 60, 61, 62, 63, 64, 65, 66, 67, 68, 69, 70, 71, 72, 73, 74, 75, 76, 77, 78, 79, 80, 81, 82, 83, 84, 85, 86, 87, 88, 89, 90, 91, 92, 93, 94, 95, 96, 97, 98, 99, 100, 101, 102, 103, 104, 105, 106, 107, 108, 109, 110, 111, 112, 113, 114, 115, 116, 117, 118, 119, 120, 121, 122, 123, 124, 125, 126, 127, 128, 129, 130, 131, 132, 133, 134, 135, 136, 137, 138, 139, 140, 141, 142, 143, 144, 145, 146, 147, 148, 149, 150, 151, 152, 153, 154, 155, 156, 157, 158, 159, 160, 161, 162, 163, 164, 165, 166, 167, 168, 169, 170, 171, 172, 173, 174, 175, 176, 177, 178, 179, 180, 181, 182, 183, 184, 185, 186, 187, 188, 189, 190, 191, 192, 193, 194, 195, 196, 197, 198, 199, 200, 201, 202, 203, 204, 205, 206, 207, 208, 209, 210, 211, 212, 213, 214, 215, 216, 217, 218, 219, 220, 221, 222, 223, 224, 225, 226, 227, 228, 229, 230, 231, 232, 233, 234, 235, 236, 237, 238, 239, 240, 241, 242, 243, 244, 245, 246, 247, 248, 249, 250, 251, 252, 253, 254, 255, 256, 257, 258, 259, 260, 261, 262, 263, 264, 265, 266, 267, 268, 269, 270, 271, 272, 273, 274, 275, 276, 277, 278, 279, 280, 281, 282, 283, 284, 285, 286, 287, 288, 289, 290, 291, 292, 293, 294, 295, 296, 297, 298, 299, 300, 301, 312, or 313, a variant, derivative, orthologue, paralogue or homologue thereof, in which:

[0966] the amino acid at Mutated site 4 is Asn, and the amino acid at Mutated site 5 is Trp.

[0967] In another preferred embodiment, the mutated PPO comprises a sequence of SEQ ID NO: 1, 2, 3, 4, 5, 6, 7, 8, 9, 10, 11, 12, 13, 14, 15, 16, 17, 18, 19, 20, 21, 22, 23, 24, 25, 26, 27, 28, 29, 30, 31, 32, 33, 34, 35, 36, 37, 38, 39, 40, 41, 42, 43, 44, 45, 46, 47, 48, 49, 50, 51, 52, 53, 54, 55, 56, 57, 58, 59, 60, 61, 62, 63, 64, 65, 66, 67, 68, 69, 70, 71, 72, 73, 74, 75, 76, 77, 78, 79, 80, 81, 82, 83, 84, 85, 86, 87, 88, 89, 90, 91, 92, 93, 94, 95, 96, 97, 98, 99, 100, 101, 102, 103, 104, 105, 106, 107, 108, 109, 110, 111, 112, 113, 114, 115, 116, 117, 118, 119, 120, 121, 122, 123, 124, 125, 126, 127, 128, 129, 130, 131, 132, 133, 134, 135, 136, 137, 138, 139, 140, 141, 142, 143, 144, 145, 146, 147, 148, 149, 150, 151, 152, 153, 154, 155, 156, 157, 158, 159, 160, 161, 162, 163, 164, 165, 166, 167, 168, 169, 170, 171, 172, 173, 174, 175, 176, 177, 178, 179, 180, 181, 182, 183, 184, 185, 186, 187, 188, 189, 190, 191, 192, 193, 194, 195, 196, 197, 198, 199, 200, 201, 202, 203, 204, 205, 206, 207, 208, 209, 210, 211, 212, 213, 214, 215, 216, 217, 218, 219, 220, 221, 222, 223, 224, 225, 226, 227, 228, 229, 230, 231, 232, 233, 234, 235, 236, 237, 238, 239, 240, 241, 242, 243, 244, 245, 246, 247, 248, 249, 250, 251, 252, 253, 254, 255, 256, 257, 258, 259, 260, 261, 262, 263, 264, 265, 266, 267, 268, 269, 270, 271, 272, 273, 274, 275, 276, 277, 278, 279, 280, 281, 282, 283, 284, 285, 286, 287, 288, 289, 290, 291, 292, 293, 294, 295, 296, 297, 298, 299, 300, 301, 312, or 313, a variant, derivative, orthologue, paralogue or homologue thereof, in which:

[0968] the amino acid at Mutated site 4 is Gln, and the amino acid at Mutated site 5 is Ala.

[0969] In another preferred embodiment, the mutated PPO comprises a sequence of SEQ ID NO: 1, 2, 3, 4, 5, 6, 7, 8, 9, 10, 11, 12, 13, 14, 15, 16, 17, 18, 19, 20, 21, 22, 23, 24, 25, 26, 27, 28, 29, 30, 31, 32, 33, 34, 35, 36, 37, 38, 39, 40, 41, 42, 43, 44, 45, 46, 47, 48, 49, 50, 51, 52, 53, 54, 55, 56, 57, 58, 59, 60, 61, 62, 63, 64, 65, 66, 67, 68, 69, 70, 71, 72, 73, 74, 75, 76, 77, 78, 79, 80, 81, 82, 83, 84, 85, 86, 87, 88, 89, 90, 91, 92, 93, 94, 95, 96, 97, 98, 99, 100, 101, 102, 103, 104, 105, 106, 107, 108, 109, 110, 111, 112, 113, 114, 115, 116, 117, 118, 119, 120, 121, 122, 123, 124, 125, 126, 127, 128, 129, 130, 131, 132, 133, 134, 135, 136, 137, 138, 139, 140, 141, 142, 143, 144, 145, 146, 147, 148, 149, 150, 151, 152, 153, 154, 155, 156, 157, 158, 159, 160, 161, 162, 163, 164, 165, 166, 167, 168, 169, 170, 171, 172, 173, 174, 175, 176, 177, 178, 179, 180, 181, 182, 183, 184, 185, 186, 187, 188, 189, 190, 191, 192, 193, 194, 195, 196, 197, 198, 199, 200, 201, 202, 203, 204, 205, 206, 207, 208, 209, 210, 211, 212, 213, 214, 215, 216, 217, 218, 219, 220, 221, 222, 223, 224, 225, 226, 227, 228, 229, 230, 231, 232, 233, 234, 235, 236, 237, 238, 239, 240, 241, 242, 243, 244, 245, 246, 247, 248, 249, 250, 251, 252, 253, 254, 255, 256, 257, 258, 259, 260, 261, 262, 263, 264, 265, 266, 267, 268, 269, 270, 271, 272, 273, 274, 275, 276, 277, 278, 279, 280, 281, 282, 283, 284, 285, 286, 287, 288, 289, 290, 291, 292, 293, 294, 295, 296, 297, 298, 299, 300, 301, 312, or 313, a variant, derivative, orthologue, paralogue or homologue thereof, in which:

[0970] the amino acid at Mutated site 4 is Gln, and the amino acid at Mutated site 5 is Leu.

[0971] In another preferred embodiment, the mutated PPO comprises a sequence of SEQ ID NO: 1, 2, 3, 4, 5, 6, 7, 8, 9, 10, 11, 12, 13, 14, 15, 16, 17, 18, 19, 20, 21, 22, 23, 24, 25, 26, 27, 28, 29, 30, 31, 32, 33, 34, 35, 36, 37, 38, 39, 40, 41, 42, 43, 44, 45, 46, 47, 48, 49, 50, 51, 52, 53, 54, 55, 56, 57, 58, 59, 60, 61, 62, 63, 64, 65, 66, 67, 68, 69, 70, 71, 72, 73, 74, 75, 76, 77, 78, 79, 80, 81, 82, 83, 84, 85, 86, 87, 88, 89, 90, 91, 92, 93, 94, 95, 96, 97, 98, 99, 100, 101, 102, 103, 104, 105, 106, 107, 108, 109, 110, 111, 112, 113, 114, 115, 116, 117, 118, 119, 120, 121, 122, 123, 124, 125, 126, 127, 128, 129, 130, 131, 132, 133, 134, 135, 136, 137, 138, 139, 140, 141, 142, 143, 144, 145, 146, 147, 148, 149, 150, 151, 152, 153, 154, 155, 156, 157, 158, 159, 160, 161, 162, 163, 164, 165, 166, 167, 168, 169, 170, 171, 172, 173, 174, 175, 176, 177, 178, 179, 180, 181, 182, 183, 184, 185, 186, 187, 188, 189, 190, 191, 192, 193, 194, 195, 196, 197, 198, 199, 200, 201, 202, 203, 204, 205, 206, 207, 208, 209, 210, 211, 212, 213, 214, 215, 216, 217, 218, 219, 220, 221, 222, 223, 224, 225, 226, 227, 228, 229, 230, 231, 232, 233, 234, 235, 236, 237, 238, 239, 240, 241, 242, 243, 244, 245, 246, 247, 248, 249, 250, 251, 252, 253, 254, 255, 256, 257, 258, 259, 260, 261, 262, 263, 264, 265, 266, 267, 268, 269, 270, 271, 272, 273, 274, 275, 276, 277, 278, 279, 280, 281, 282, 283, 284, 285, 286, 287, 288, 289, 290, 291, 292, 293, 294, 295, 296, 297, 298, 299, 300, 301, 312, or 313, a variant, derivative, orthologue, paralogue or homologue thereof, in which:

[0972] the amino acid at Mutated site 4 is Gin, and the amino acid at Mutated site 5 is Val.

[0973] In another preferred embodiment, the mutated PPO comprises a sequence of SEQ ID NO: 1, 2, 3, 4, 5, 6, 7, 8, 9, 10, 11, 12, 13, 14, 15, 16, 17, 18, 19, 20, 21, 22, 23, 24, 25, 26, 27, 28, 29, 30, 31, 32, 33, 34, 35, 36, 37, 38, 39, 40, 41, 42, 43, 44, 45, 46, 47, 48, 49, 50, 51, 52, 53, 54, 55, 56, 57, 58, 59, 60, 61, 62, 63, 64, 65, 66, 67, 68, 69, 70, 71, 72, 73, 74, 75, 76, 77, 78, 79, 80, 81, 82, 83, 84, 85, 86, 87, 88, 89, 90, 91, 92, 93, 94, 95, 96, 97, 98, 99, 100, 101, 102, 103, 104, 105, 106, 107, 108, 109, 110, 111, 112, 113, 114, 115, 116, 117, 118, 119, 120, 121, 122, 123, 124, 125, 126, 127, 128, 129, 130, 131, 132, 133, 134, 135, 136, 137, 138, 139, 140, 141, 142, 143, 144, 145, 146, 147, 148, 149, 150, 151, 152, 153, 154, 155, 156, 157, 158, 159, 160, 161, 162, 163, 164, 165, 166, 167, 168, 169, 170, 171, 172, 173, 174, 175, 176, 177, 178, 179, 180, 181, 182, 183, 184, 185, 186, 187, 188, 189, 190, 191, 192, 193, 194, 195, 196, 197, 198, 199, 200, 201, 202, 203, 204, 205, 206, 207, 208, 209, 210, 211, 212, 213, 214, 215, 216, 217, 218, 219, 220, 221, 222, 223, 224, 225, 226, 227, 228, 229, 230, 231, 232, 233, 234, 235, 236, 237, 238, 239, 240, 241, 242, 243, 244, 245, 246, 247, 248, 249, 250, 251, 252, 253, 254, 255, 256, 257, 258, 259, 260, 261, 262, 263, 264, 265, 266, 267, 268, 269, 270, 271, 272, 273, 274, 275, 276, 277, 278, 279, 280, 281, 282, 283, 284, 285, 286, 287, 288, 289, 290, 291, 292, 293, 294, 295, 296, 297, 298, 299, 300, 301, 312, or 313, a variant, derivative, orthologue, paralogue or homologue thereof, in which:

[0974] the amino acid at Mutated site 4 is Gln, and the amino acid at Mutated site 5 is Ile.

[0975] In another preferred embodiment, the mutated PPO comprises a sequence of SEQ ID NO: 1, 2, 3, 4, 5, 6, 7, 8, 9, 10, 11, 12, 13, 14, 15, 16, 17, 18, 19, 20, 21, 22, 23, 24, 25, 26, 27, 28, 29, 30, 31, 32, 33, 34, 35, 36, 37, 38, 39, 40, 41, 42, 43, 44, 45, 46, 47, 48, 49, 50, 51, 52, 53, 54, 55, 56, 57, 58, 59, 60, 61, 62, 63, 64, 65, 66, 67, 68, 69, 70, 71, 72, 73, 74, 75, 76, 77, 78, 79, 80, 81, 82, 83, 84, 85, 86, 87, 88, 89, 90, 91, 92, 93, 94, 95, 96, 97, 98, 99, 100, 101, 102, 103, 104, 105, 106, 107, 108, 109, 110, 111, 112, 113, 114, 115, 116, 117, 118, 119, 120, 121, 122, 123, 124, 125, 126, 127, 128, 129, 130, 131, 132, 133, 134, 135, 136, 137, 138, 139, 140, 141, 142, 143, 144, 145, 146, 147, 148, 149, 150, 151, 152, 153, 154, 155, 156, 157, 158, 159, 160, 161, 162, 163, 164, 165, 166, 167, 168, 169, 170, 171, 172, 173, 174, 175, 176, 177, 178, 179, 180, 181, 182, 183, 184, 185, 186, 187, 188, 189, 190, 191, 192, 193, 194, 195, 196, 197, 198, 199, 200, 201, 202, 203, 204, 205, 206, 207, 208, 209, 210, 211, 212, 213, 214, 215, 216, 217, 218, 219, 220, 221, 222, 223, 224, 225, 226, 227, 228, 229, 230, 231, 232, 233, 234, 235, 236, 237, 238, 239, 240, 241, 242, 243, 244, 245, 246, 247, 248, 249, 250, 251, 252, 253, 254, 255, 256, 257, 258, 259, 260, 261, 262, 263, 264, 265, 266, 267, 268, 269, 270, 271, 272, 273, 274, 275, 276, 277, 278, 279, 280, 281, 282, 283, 284, 285, 286, 287, 288, 289, 290, 291, 292, 293, 294, 295, 296, 297, 298, 299, 300, 301, 312, or 313, a variant, derivative, orthologue, paralogue or homologue thereof, in which:

[0976] the amino acid at Mutated site 4 is Gln, and the amino acid at Mutated site 5 is Met.

[0977] In another preferred embodiment, the mutated PPO comprises a sequence of SEQ ID NO: 1, 2, 3, 4, 5, 6, 7, 8, 9, 10, 11, 12, 13, 14, 15, 16, 17, 18, 19, 20, 21, 22, 23, 24, 25, 26, 27, 28, 29, 30, 31, 32, 33, 34, 35, 36, 37, 38, 39, 40, 41, 42, 43, 44, 45, 46, 47, 48, 49, 50, 51, 52, 53, 54, 55, 56, 57, 58, 59, 60, 61, 62, 63, 64, 65, 66, 67, 68, 69, 70, 71, 72, 73, 74, 75, 76, 77, 78, 79, 80, 81, 82, 83, 84, 85, 86, 87, 88, 89, 90, 91, 92, 93, 94, 95, 96, 97, 98, 99, 100, 101, 102, 103, 104, 105, 106, 107, 108, 109, 110, 111, 112, 113, 114, 115, 116, 117, 118, 119, 120, 121, 122, 123, 124, 125, 126, 127, 128, 129, 130, 131, 132, 133, 134, 135, 136, 137, 138, 139, 140, 141, 142, 143, 144, 145, 146, 147, 148, 149, 150, 151, 152, 153, 154, 155, 156, 157, 158, 159, 160, 161, 162, 163, 164, 165, 166, 167, 168, 169, 170, 171, 172, 173, 174, 175, 176, 177, 178, 179, 180, 181, 182, 183, 184, 185, 186, 187, 188, 189, 190, 191, 192, 193, 194, 195, 196, 197, 198, 199, 200, 201, 202, 203, 204, 205, 206, 207, 208, 209, 210, 211, 212, 213, 214, 215, 216, 217, 218, 219, 220, 221, 222, 223, 224, 225, 226, 227, 228, 229, 230, 231, 232, 233, 234, 235, 236, 237, 238, 239, 240, 241, 242, 243, 244, 245, 246, 247, 248, 249, 250, 251, 252, 253, 254, 255, 256, 257, 258, 259, 260, 261, 262, 263, 264, 265, 266, 267, 268, 269, 270, 271, 272, 273, 274, 275, 276, 277, 278, 279, 280, 281, 282, 283, 284, 285, 286, 287, 288, 289, 290, 291, 292, 293, 294, 295, 296, 297, 298, 299, 300, 301, 312, or 313, a variant, derivative, orthologue, paralogue or homologue thereof, in which:

[0978] the amino acid at Mutated site 4 is Gln, and the amino acid at Mutated site 5 is His.

[0979] In another preferred embodiment, the mutated PPO comprises a sequence of SEQ ID NO: 1, 2, 3, 4, 5, 6, 7, 8, 9, 10, 11, 12, 13, 14, 15, 16, 17, 18, 19, 20, 21, 22, 23, 24, 25, 26, 27, 28, 29, 30, 31, 32, 33, 34, 35, 36, 37, 38, 39, 40, 41, 42, 43, 44, 45, 46, 47, 48, 49, 50, 51, 52, 53, 54, 55, 56, 57, 58, 59, 60, 61, 62, 63, 64, 65, 66, 67, 68, 69, 70, 71, 72, 73, 74, 75, 76, 77, 78, 79, 80, 81, 82, 83, 84, 85, 86, 87, 88, 89, 90, 91, 92, 93, 94, 95, 96, 97, 98, 99, 100, 101, 102, 103, 104, 105, 106, 107, 108, 109, 110, 111, 112, 113, 114, 115, 116, 117, 118, 119, 120, 121, 122, 123, 124, 125, 126, 127, 128, 129, 130, 131, 132, 133, 134, 135, 136, 137, 138, 139, 140, 141, 142, 143, 144, 145, 146, 147, 148, 149, 150, 151, 152, 153, 154, 155, 156, 157, 158, 159, 160, 161, 162, 163, 164, 165, 166, 167, 168, 169, 170, 171, 172, 173, 174, 175, 176, 177, 178, 179, 180, 181, 182, 183, 184, 185, 186, 187, 188, 189, 190, 191, 192, 193, 194, 195, 196, 197, 198, 199, 200, 201, 202, 203, 204, 205, 206, 207, 208, 209, 210, 211, 212, 213, 214, 215, 216, 217, 218, 219, 220, 221, 222, 223, 224, 225, 226, 227, 228, 229, 230, 231, 232, 233, 234, 235, 236, 237, 238, 239, 240, 241, 242, 243, 244, 245, 246, 247, 248, 249, 250, 251, 252, 253, 254, 255, 256, 257, 258, 259, 260, 261, 262, 263, 264, 265, 266, 267, 268, 269, 270, 271, 272, 273, 274, 275, 276, 277, 278, 279, 280, 281, 282, 283, 284, 285, 286, 287, 288, 289, 290, 291, 292, 293, 294, 295, 296, 297, 298, 299, 300, 301, 312, or 313, a variant, derivative, orthologue, paralogue or homologue thereof, in which:

[0980] the amino acid at Mutated site 4 is Gin, and the amino acid at Mutated site 5 is Lys.

[0981] In another preferred embodiment, the mutated PPO comprises a sequence of SEQ ID NO: 1, 2, 3, 4, 5, 6, 7, 8, 9, 10, 11, 12, 13, 14, 15, 16, 17, 18, 19, 20, 21, 22, 23, 24, 25, 26, 27, 28, 29, 30, 31, 32, 33, 34, 35, 36, 37, 38, 39, 40, 41, 42, 43, 44, 45, 46, 47, 48, 49, 50, 51, 52, 53, 54, 55, 56, 57, 58, 59, 60, 61, 62, 63, 64, 65, 66, 67, 68, 69, 70, 71, 72, 73, 74, 75, 76, 77, 78, 79, 80, 81, 82, 83, 84, 85, 86, 87, 88, 89, 90, 91, 92, 93, 94, 95, 96, 97, 98, 99, 100, 101, 102, 103, 104, 105, 106, 107, 108, 109, 110, 111, 112, 113, 114, 115, 116, 117, 118, 119, 120, 121, 122, 123, 124, 125, 126, 127, 128, 129, 130, 131, 132, 133, 134, 135, 136, 137, 138, 139, 140, 141, 142, 143, 144, 145, 146, 147, 148, 149, 150, 151, 152, 153, 154, 155, 156, 157, 158, 159, 160, 161, 162, 163, 164, 165, 166, 167, 168, 169, 170, 171, 172, 173, 174, 175, 176, 177, 178, 179, 180, 181, 182, 183, 184, 185, 186, 187, 188, 189, 190, 191, 192, 193, 194, 195, 196, 197, 198, 199, 200, 201, 202, 203, 204, 205, 206, 207, 208, 209, 210, 211, 212, 213, 214, 215, 216, 217, 218, 219, 220, 221, 222, 223, 224, 225, 226, 227, 228, 229, 230, 231, 232, 233, 234, 235, 236, 237, 238, 239, 240, 241, 242, 243, 244, 245, 246, 247, 248, 249, 250, 251, 252, 253, 254, 255, 256, 257, 258, 259, 260, 261, 262, 263, 264, 265, 266, 267, 268, 269, 270, 271, 272, 273, 274, 275, 276, 277, 278, 279, 280, 281, 282, 283, 284, 285, 286, 287, 288, 289, 290, 291, 292, 293, 294, 295, 296, 297, 298, 299, 300, 301, 312, or 313, a variant, derivative, orthologue, paralogue or homologue thereof, in which:

[0982] the amino acid at Mutated site 4 is Gin, and the amino acid at Mutated site 5 is Asp.

[0983] In another preferred embodiment, the mutated PPO comprises a sequence of SEQ ID NO: 1, 2, 3, 4, 5, 6, 7, 8, 9, 10, 11, 12, 13, 14, 15, 16, 17, 18, 19, 20, 21, 22, 23, 24, 25, 26, 27, 28, 29, 30, 31, 32, 33, 34, 35, 36, 37, 38, 39, 40, 41, 42, 43, 44, 45, 46, 47, 48, 49, 50, 51, 52, 53, 54, 55, 56, 57, 58, 59, 60, 61, 62, 63, 64, 65, 66, 67, 68, 69, 70, 71, 72, 73, 74, 75, 76, 77, 78, 79, 80, 81, 82, 83, 84, 85, 86, 87, 88, 89, 90, 91, 92, 93, 94, 95, 96, 97, 98, 99, 100, 101, 102, 103, 104, 105, 106, 107, 108, 109, 110, 111, 112, 113, 114, 115, 116, 117, 118, 119, 120, 121, 122, 123, 124, 125, 126, 127, 128, 129, 130, 131, 132, 133, 134, 135, 136, 137, 138, 139, 140, 141, 142, 143, 144, 145, 146, 147, 148, 149, 150, 151, 152, 153, 154, 155, 156, 157, 158, 159, 160, 161, 162, 163, 164, 165, 166, 167, 168, 169, 170, 171, 172, 173, 174, 175, 176, 177, 178, 179, 180, 181, 182, 183, 184, 185, 186, 187, 188, 189, 190, 191, 192, 193, 194, 195, 196, 197, 198, 199, 200, 201, 202, 203, 204, 205, 206, 207, 208, 209, 210, 211, 212, 213, 214, 215, 216, 217, 218, 219, 220, 221, 222, 223, 224, 225, 226, 227, 228, 229, 230, 231, 232, 233, 234, 235, 236, 237, 238, 239, 240, 241, 242, 243, 244, 245, 246, 247, 248, 249, 250, 251, 252, 253, 254, 255, 256, 257, 258, 259, 260, 261, 262, 263, 264, 265, 266, 267, 268, 269, 270, 271, 272, 273, 274, 275, 276, 277, 278, 279, 280, 281, 282, 283, 284, 285, 286, 287, 288, 289, 290, 291, 292, 293, 294, 295, 296, 297, 298, 299, 300, 301, 312, or 313, a variant, derivative, orthologue, paralogue or homologue thereof, in which:

[0984] the amino acid at Mutated site 4 is Gln, and the amino acid at Mutated site 5 is Glu.

[0985] In another preferred embodiment, the mutated PPO comprises a sequence of SEQ ID NO: 1, 2, 3, 4, 5, 6, 7, 8, 9, 10, 11, 12, 13, 14, 15, 16, 17, 18, 19, 20, 21, 22, 23, 24, 25, 26, 27, 28, 29, 30, 31, 32, 33, 34, 35, 36, 37, 38, 39, 40, 41, 42, 43, 44, 45, 46, 47, 48, 49, 50, 51, 52, 53, 54, 55, 56, 57, 58, 59, 60, 61, 62, 63, 64, 65, 66, 67, 68, 69, 70, 71, 72, 73, 74, 75, 76, 77, 78, 79, 80, 81, 82, 83, 84, 85, 86, 87, 88, 89, 90, 91, 92, 93, 94, 95, 96, 97, 98, 99, 100, 101, 102, 103, 104, 105, 106, 107, 108, 109, 110, 111, 112, 113, 114, 115, 116, 117, 118, 119, 120, 121, 122, 123, 124, 125, 126, 127, 128, 129, 130, 131, 132, 133, 134, 135, 136, 137, 138, 139, 140, 141, 142, 143, 144, 145, 146, 147, 148, 149, 150, 151, 152, 153, 154, 155, 156, 157, 158, 159, 160, 161, 162, 163, 164, 165, 166, 167, 168, 169, 170, 171, 172, 173, 174, 175, 176, 177, 178, 179, 180, 181, 182, 183, 184, 185, 186, 187, 188, 189, 190, 191, 192, 193, 194, 195, 196, 197, 198, 199, 200, 201, 202, 203, 204, 205, 206, 207, 208, 209, 210, 211, 212, 213, 214, 215, 216, 217, 218, 219, 220, 221, 222, 223, 224, 225, 226, 227, 228, 229, 230, 231, 232, 233, 234, 235, 236, 237, 238, 239, 240, 241, 242, 243, 244, 245, 246, 247, 248, 249, 250, 251, 252, 253, 254, 255, 256, 257, 258, 259, 260, 261, 262, 263, 264, 265, 266, 267, 268, 269, 270, 271, 272, 273, 274, 275, 276, 277, 278, 279, 280, 281, 282, 283, 284, 285, 286, 287, 288, 289, 290, 291, 292, 293, 294, 295, 296, 297, 298, 299, 300, 301, 312, or 313, a variant, derivative, orthologue, paralogue or homologue thereof, in which:

[0986] the amino acid at Mutated site 4 is Gin, and the amino acid at Mutated site 5 is Ser.

[0987] In another preferred embodiment, the mutated PPO comprises a sequence of SEQ ID NO: 1, 2, 3, 4, 5, 6, 7, 8, 9, 10, 11, 12, 13, 14, 15, 16, 17, 18, 19, 20, 21, 22, 23, 24, 25, 26, 27, 28, 29, 30, 31, 32, 33, 34, 35, 36, 37, 38, 39, 40, 41, 42, 43, 44, 45, 46, 47, 48, 49, 50, 51, 52, 53, 54, 55, 56, 57, 58, 59, 60, 61, 62, 63, 64, 65, 66, 67, 68, 69, 70, 71, 72, 73, 74, 75, 76, 77, 78, 79, 80, 81, 82, 83, 84, 85, 86, 87, 88, 89, 90, 91, 92, 93, 94, 95, 96, 97, 98, 99, 100, 101, 102, 103, 104, 105, 106, 107, 108, 109, 110, 111, 112, 113, 114, 115, 116, 117, 118, 119, 120, 121, 122, 123, 124, 125, 126, 127, 128, 129, 130, 131, 132, 133, 134, 135, 136, 137, 138, 139, 140, 141, 142, 143, 144, 145, 146, 147, 148, 149, 150, 151, 152, 153, 154, 155, 156, 157, 158, 159, 160, 161, 162, 163, 164, 165, 166, 167, 168, 169, 170, 171, 172, 173, 174, 175, 176, 177, 178, 179, 180, 181, 182, 183, 184, 185, 186, 187, 188, 189, 190, 191, 192, 193, 194, 195, 196, 197, 198, 199, 200, 201, 202, 203, 204, 205, 206, 207, 208, 209, 210, 211, 212, 213, 214, 215, 216, 217, 218, 219, 220, 221, 222, 223, 224, 225, 226, 227, 228, 229, 230, 231, 232, 233, 234, 235, 236, 237, 238, 239, 240, 241, 242, 243, 244, 245, 246, 247, 248, 249, 250, 251, 252, 253, 254, 255, 256, 257, 258, 259, 260, 261, 262, 263, 264, 265, 266, 267, 268, 269, 270, 271, 272, 273, 274, 275, 276, 277, 278, 279, 280, 281, 282, 283, 284, 285, 286, 287, 288, 289, 290, 291, 292, 293, 294, 295, 296, 297, 298, 299, 300, 301, 312, or 313, a variant, derivative, orthologue, paralogue or homologue thereof, in which:

[0988] the amino acid at Mutated site 4 is Gln, and the amino acid at Mutated site 5 is Thr.

[0989] In another preferred embodiment, the mutated PPO comprises a sequence of SEQ ID NO: 1, 2, 3, 4, 5, 6, 7, 8, 9, 10, 11, 12, 13, 14, 15, 16, 17, 18, 19, 20, 21, 22, 23, 24, 25, 26, 27, 28, 29, 30, 31, 32, 33, 34, 35, 36, 37, 38, 39, 40, 41, 42, 43, 44, 45, 46, 47, 48, 49, 50, 51, 52, 53, 54, 55, 56, 57, 58, 59, 60, 61, 62, 63, 64, 65, 66, 67, 68, 69, 70, 71, 72, 73, 74, 75, 76, 77, 78, 79, 80, 81, 82, 83, 84, 85, 86, 87, 88, 89, 90, 91, 92, 93, 94, 95, 96, 97, 98, 99, 100, 101, 102, 103, 104, 105, 106, 107, 108, 109, 110, 111, 112, 113, 114, 115, 116, 117, 118, 119, 120, 121, 122, 123, 124, 125, 126, 127, 128, 129, 130, 131, 132, 133, 134, 135, 136, 137, 138, 139, 140, 141, 142, 143, 144, 145, 146, 147, 148, 149, 150, 151, 152, 153, 154, 155, 156, 157, 158, 159, 160, 161, 162, 163, 164, 165, 166, 167, 168, 169, 170, 171, 172, 173, 174, 175, 176, 177, 178, 179, 180, 181, 182, 183, 184, 185, 186, 187, 188, 189, 190, 191, 192, 193, 194, 195, 196, 197, 198, 199, 200, 201, 202, 203, 204, 205, 206, 207, 208, 209, 210, 211, 212, 213, 214, 215, 216, 217, 218, 219, 220, 221, 222, 223, 224, 225, 226, 227, 228, 229, 230, 231, 232, 233, 234, 235, 236, 237, 238, 239, 240, 241, 242, 243, 244, 245, 246, 247, 248, 249, 250, 251, 252, 253, 254, 255, 256, 257, 258, 259, 260, 261, 262, 263, 264, 265, 266, 267, 268, 269, 270, 271, 272, 273, 274, 275, 276, 277, 278, 279, 280, 281, 282, 283, 284, 285, 286, 287, 288, 289, 290, 291, 292, 293, 294, 295, 296, 297, 298, 299, 300, 301, 312, or 313, a variant, derivative, orthologue, paralogue or homologue thereof, in which:

[0990] the amino acid at Mutated site 4 is Gin, and the amino acid at Mutated site 5 is Asn.

[0991] In another preferred embodiment, the mutated PPO comprises a sequence of SEQ ID NO: 1, 2, 3, 4, 5, 6, 7, 8, 9, 10, 11, 12, 13, 14, 15, 16, 17, 18, 19, 20, 21, 22, 23, 24, 25, 26, 27, 28, 29, 30, 31, 32, 33, 34, 35, 36, 37, 38, 39, 40, 41, 42, 43, 44, 45, 46, 47, 48, 49, 50, 51, 52, 53, 54, 55, 56, 57, 58, 59, 60, 61, 62, 63, 64, 65, 66, 67, 68, 69, 70, 71, 72, 73, 74, 75, 76, 77, 78, 79, 80, 81, 82, 83, 84, 85, 86, 87, 88, 89, 90, 91, 92, 93, 94, 95, 96, 97, 98, 99, 100, 101, 102, 103, 104, 105, 106, 107, 108, 109, 110, 111, 112, 113, 114, 115, 116, 117, 118, 119, 120, 121, 122, 123, 124, 125, 126, 127, 128, 129, 130, 131, 132, 133, 134, 135, 136, 137, 138, 139, 140, 141, 142, 143, 144, 145, 146, 147, 148, 149, 150, 151, 152, 153, 154, 155, 156, 157, 158, 159, 160, 161, 162, 163, 164, 165, 166, 167, 168, 169, 170, 171, 172, 173, 174, 175, 176, 177, 178, 179, 180, 181, 182, 183, 184, 185, 186, 187, 188, 189, 190, 191, 192, 193, 194, 195, 196, 197, 198, 199, 200, 201, 202, 203, 204, 205, 206, 207, 208, 209, 210, 211, 212, 213, 214, 215, 216, 217, 218, 219, 220, 221, 222, 223, 224, 225, 226, 227, 228, 229, 230, 231, 232, 233, 234, 235, 236, 237, 238, 239, 240, 241, 242, 243, 244, 245, 246, 247, 248, 249, 250, 251, 252, 253, 254, 255, 256, 257, 258, 259, 260, 261, 262, 263, 264, 265, 266, 267, 268, 269, 270, 271, 272, 273, 274, 275, 276, 277, 278, 279, 280, 281, 282, 283, 284, 285, 286, 287, 288, 289, 290, 291, 292, 293, 294, 295, 296, 297, 298, 299, 300, 301, 312, or 313, a variant, derivative, orthologue, paralogue or homologue thereof, in which:

[0992] the amino acid at Mutated site 4 is Gln, and the amino acid at Mutated site 5 is Gln.

[0993] In another preferred embodiment, the mutated PPO comprises a sequence of SEQ ID NO: 1, 2, 3, 4, 5, 6, 7, 8, 9, 10, 11, 12, 13, 14, 15, 16, 17, 18, 19, 20, 21, 22, 23, 24, 25, 26, 27, 28, 29, 30, 31, 32, 33, 34, 35, 36, 37, 38, 39, 40, 41, 42, 43, 44, 45, 46, 47, 48, 49, 50, 51, 52, 53, 54, 55, 56, 57, 58, 59, 60, 61, 62, 63, 64, 65, 66, 67, 68, 69, 70, 71, 72, 73, 74, 75, 76, 77, 78, 79, 80, 81, 82, 83, 84, 85, 86, 87, 88, 89, 90, 91, 92, 93, 94, 95, 96, 97, 98, 99, 100, 101, 102, 103, 104, 105, 106, 107, 108, 109, 110, 111, 112, 113, 114, 115, 116, 117, 118, 119, 120, 121, 122, 123, 124, 125, 126, 127, 128, 129, 130, 131, 132, 133, 134, 135, 136, 137, 138, 139, 140, 141, 142, 143, 144, 145, 146, 147, 148, 149, 150, 151, 152, 153, 154, 155, 156, 157, 158, 159, 160, 161, 162, 163, 164, 165, 166, 167, 168, 169, 170, 171, 172, 173, 174, 175, 176, 177, 178, 179, 180, 181, 182, 183, 184, 185, 186, 187, 188, 189, 190, 191, 192, 193, 194, 195, 196, 197, 198, 199, 200, 201, 202, 203, 204, 205, 206, 207, 208, 209, 210, 211, 212, 213, 214, 215, 216, 217, 218, 219, 220, 221, 222, 223, 224, 225, 226, 227, 228, 229, 230, 231, 232, 233, 234, 235, 236, 237, 238, 239, 240, 241, 242, 243, 244, 245, 246, 247, 248, 249, 250, 251, 252, 253, 254, 255, 256, 257, 258, 259, 260, 261, 262, 263, 264, 265, 266, 267, 268, 269, 270, 271, 272, 273, 274, 275, 276, 277, 278, 279, 280, 281, 282, 283, 284, 285, 286, 287, 288, 289, 290, 291, 292, 293, 294, 295, 296, 297, 298, 299, 300, 301, 312, or 313, a variant, derivative, orthologue, paralogue or homologue thereof, in which:

[0994] the amino acid at Mutated site 4 is Gin, and the amino acid at Mutated site 5 is Cys.

[0995] In another preferred embodiment, the mutated PPO comprises a sequence of SEQ ID NO: 1, 2, 3, 4, 5, 6, 7, 8, 9, 10, 11, 12, 13, 14, 15, 16, 17, 18, 19, 20, 21, 22, 23, 24, 25, 26, 27, 28, 29, 30, 31, 32, 33, 34, 35, 36, 37, 38, 39, 40, 41, 42, 43, 44, 45, 46, 47, 48, 49, 50, 51, 52, 53, 54, 55, 56, 57, 58, 59, 60, 61, 62, 63, 64, 65, 66, 67, 68, 69, 70, 71, 72, 73, 74, 75, 76, 77, 78, 79, 80, 81, 82, 83, 84, 85, 86, 87, 88, 89, 90, 91, 92, 93, 94, 95, 96, 97, 98, 99, 100, 101, 102, 103, 104, 105, 106, 107, 108, 109, 110, 111, 112, 113, 114, 115, 116, 117, 118, 119, 120, 121, 122, 123, 124, 125, 126, 127, 128, 129, 130, 131, 132, 133, 134, 135, 136, 137, 138, 139, 140, 141, 142, 143, 144, 145, 146, 147, 148, 149, 150, 151, 152, 153, 154, 155, 156, 157, 158, 159, 160, 161, 162, 163, 164, 165, 166, 167, 168, 169, 170, 171, 172, 173, 174, 175, 176, 177, 178, 179, 180, 181, 182, 183, 184, 185, 186, 187, 188, 189, 190, 191, 192, 193, 194, 195, 196, 197, 198, 199, 200, 201, 202, 203, 204, 205, 206, 207, 208, 209, 210, 211, 212, 213, 214, 215, 216, 217, 218, 219, 220, 221, 222, 223, 224, 225, 226, 227, 228, 229, 230, 231, 232, 233, 234, 235, 236, 237, 238, 239, 240, 241, 242, 243, 244, 245, 246, 247, 248, 249, 250, 251, 252, 253, 254, 255, 256, 257, 258, 259, 260, 261, 262, 263, 264, 265, 266, 267, 268, 269, 270, 271, 272, 273, 274, 275, 276, 277, 278, 279, 280, 281, 282, 283, 284, 285, 286, 287, 288, 289, 290, 291, 292, 293, 294, 295, 296, 297, 298, 299, 300, 301, 312, or 313, a variant, derivative, orthologue, paralogue or homologue thereof, in which:

[0996] the amino acid at Mutated site 4 is Gln, and the amino acid at Mutated site 5 is Gly.

[0997] In another preferred embodiment, the mutated PPO comprises a sequence of SEQ ID NO: 1, 2, 3, 4, 5, 6, 7, 8, 9, 10, 11, 12, 13, 14, 15, 16, 17, 18, 19, 20, 21, 22, 23, 24, 25, 26, 27, 28, 29, 30, 31, 32, 33, 34, 35, 36, 37, 38, 39, 40, 41, 42, 43, 44, 45, 46, 47, 48, 49, 50, 51, 52, 53, 54, 55, 56, 57, 58, 59, 60, 61, 62, 63, 64, 65, 66, 67, 68, 69, 70, 71, 72, 73, 74, 75, 76, 77, 78, 79, 80, 81, 82, 83, 84, 85, 86, 87, 88, 89, 90, 91, 92, 93, 94, 95, 96, 97, 98, 99, 100, 101, 102, 103, 104, 105, 106, 107, 108, 109, 110, 111, 112, 113, 114, 115, 116, 117, 118, 119, 120, 121, 122, 123, 124, 125, 126, 127, 128, 129, 130, 131, 132, 133, 134, 135, 136, 137, 138, 139, 140, 141, 142, 143, 144, 145, 146, 147, 148, 149, 150, 151, 152, 153, 154, 155, 156, 157, 158, 159, 160, 161, 162, 163, 164, 165, 166, 167, 168, 169, 170, 171, 172, 173, 174, 175, 176, 177, 178, 179, 180, 181, 182, 183, 184, 185, 186, 187, 188, 189, 190, 191, 192, 193, 194, 195, 196, 197, 198, 199, 200, 201, 202, 203, 204, 205, 206, 207, 208, 209, 210, 211, 212, 213, 214, 215, 216, 217, 218, 219, 220, 221, 222, 223, 224, 225, 226, 227, 228, 229, 230, 231, 232, 233, 234, 235, 236, 237, 238, 239, 240, 241, 242, 243, 244, 245, 246, 247, 248, 249, 250, 251, 252, 253, 254, 255, 256, 257, 258, 259, 260, 261, 262, 263, 264, 265, 266, 267, 268, 269, 270, 271, 272, 273, 274, 275, 276, 277, 278, 279, 280, 281, 282, 283, 284, 285, 286, 287, 288, 289, 290, 291, 292, 293, 294, 295, 296, 297, 298, 299, 300, 301, 312, or 313, a variant, derivative, orthologue, paralogue or homologue thereof, in which:

[0998] the amino acid at Mutated site 4 is Gin, and the amino acid at Mutated site 5 is Pro.

[0999] In another preferred embodiment, the mutated PPO comprises a sequence of SEQ ID NO: 1, 2, 3, 4, 5, 6, 7, 8, 9, 10, 11, 12, 13, 14, 15, 16, 17, 18, 19, 20, 21, 22, 23, 24, 25, 26, 27, 28, 29, 30, 31, 32, 33, 34, 35, 36, 37, 38, 39, 40, 41, 42, 43, 44, 45, 46, 47, 48, 49, 50, 51, 52, 53, 54, 55, 56, 57, 58, 59, 60, 61, 62, 63, 64, 65, 66, 67, 68, 69, 70, 71, 72, 73, 74, 75, 76, 77, 78, 79, 80, 81, 82, 83, 84, 85, 86, 87, 88, 89, 90, 91, 92, 93, 94, 95, 96, 97, 98, 99, 100, 101, 102, 103, 104, 105, 106, 107, 108, 109, 110, 111, 112, 113, 114, 115, 116, 117, 118, 119, 120, 121, 122, 123, 124, 125, 126, 127, 128, 129, 130, 131, 132, 133, 134, 135, 136, 137, 138, 139, 140, 141, 142, 143, 144, 145, 146, 147, 148, 149, 150, 151, 152, 153, 154, 155, 156, 157, 158, 159, 160, 161, 162, 163, 164, 165, 166, 167, 168, 169, 170, 171, 172, 173, 174, 175, 176, 177, 178, 179, 180, 181, 182, 183, 184, 185, 186, 187, 188, 189, 190, 191, 192, 193, 194, 195, 196, 197, 198, 199, 200, 201, 202, 203, 204, 205, 206, 207, 208, 209, 210, 211, 212, 213, 214, 215, 216, 217, 218, 219, 220, 221, 222, 223, 224, 225, 226, 227, 228, 229, 230, 231, 232, 233, 234, 235, 236, 237, 238, 239, 240, 241, 242, 243, 244, 245, 246, 247, 248, 249, 250, 251, 252, 253, 254, 255, 256, 257, 258, 259, 260, 261, 262, 263, 264, 265, 266, 267, 268, 269, 270, 271, 272, 273, 274, 275, 276, 277, 278, 279, 280, 281, 282, 283, 284, 285, 286, 287, 288, 289, 290, 291, 292, 293, 294, 295, 296, 297, 298, 299, 300, 301, 312, or 313, a variant, derivative, orthologue, paralogue or homologue thereof, in which:

[1000] the amino acid at Mutated site 4 is Gln, and the amino acid at Mutated site 5 is Arg.

[1001] In another preferred embodiment, the mutated PPO comprises a sequence of SEQ ID NO: 1, 2, 3, 4, 5, 6, 7, 8, 9, 10, 11, 12, 13, 14, 15, 16, 17, 18, 19, 20, 21, 22, 23, 24, 25, 26, 27, 28, 29, 30, 31, 32, 33, 34, 35, 36, 37, 38, 39, 40, 41, 42, 43, 44, 45, 46, 47, 48, 49, 50, 51, 52, 53, 54, 55, 56, 57, 58, 59, 60, 61, 62, 63, 64, 65, 66, 67, 68, 69, 70, 71, 72, 73, 74, 75, 76, 77, 78, 79, 80, 81, 82, 83, 84, 85, 86, 87, 88, 89, 90, 91, 92, 93, 94, 95, 96, 97, 98, 99, 100, 101, 102, 103, 104, 105, 106, 107, 108, 109, 110, 111, 112, 113, 114, 115, 116, 117, 118, 119, 120, 121, 122, 123, 124, 125, 126, 127, 128, 129, 130, 131, 132, 133, 134, 135, 136, 137, 138, 139, 140, 141, 142, 143, 144, 145, 146, 147, 148, 149, 150, 151, 152, 153, 154, 155, 156, 157, 158, 159, 160, 161, 162, 163, 164, 165, 166, 167, 168, 169, 170, 171, 172, 173, 174, 175, 176, 177, 178, 179, 180, 181, 182, 183, 184, 185, 186, 187, 188, 189, 190, 191, 192, 193, 194, 195, 196, 197, 198, 199, 200, 201, 202, 203, 204, 205, 206, 207, 208, 209, 210, 211, 212, 213, 214, 215, 216, 217, 218, 219, 220, 221, 222, 223, 224, 225, 226, 227, 228, 229, 230, 231, 232, 233, 234, 235, 236, 237, 238, 239, 240, 241, 242, 243, 244, 245, 246, 247, 248, 249, 250, 251, 252, 253, 254, 255, 256, 257, 258, 259, 260, 261, 262, 263, 264, 265, 266, 267, 268, 269, 270, 271, 272, 273, 274, 275, 276, 277, 278, 279, 280, 281, 282, 283, 284, 285, 286, 287, 288, 289, 290, 291, 292, 293, 294, 295, 296, 297, 298, 299, 300, 301, 312, or 313, a variant, derivative, orthologue, paralogue or homologue thereof, in which:

[1002] the amino acid at Mutated site 4 is Gln, and the amino acid at Mutated site 5 is Tyr.

[1003] In another preferred embodiment, the mutated PPO comprises a sequence of SEQ ID NO: 1, 2, 3, 4, 5, 6, 7, 8, 9, 10, 11, 12, 13, 14, 15, 16, 17, 18, 19, 20, 21, 22, 23, 24, 25, 26, 27, 28, 29, 30, 31, 32, 33, 34, 35, 36, 37, 38, 39, 40, 41, 42, 43, 44, 45, 46, 47, 48, 49, 50, 51, 52, 53, 54, 55, 56, 57, 58, 59, 60, 61, 62, 63, 64, 65, 66, 67, 68, 69, 70, 71, 72, 73, 74, 75, 76, 77, 78, 79, 80, 81, 82, 83, 84, 85, 86, 87, 88, 89, 90, 91, 92, 93, 94, 95, 96, 97, 98, 99, 100, 101, 102, 103, 104, 105, 106, 107, 108, 109, 110, 111, 112, 113, 114, 115, 116, 117, 118, 119, 120, 121, 122, 123, 124, 125, 126, 127, 128, 129, 130, 131, 132, 133, 134, 135, 136, 137, 138, 139, 140, 141, 142, 143, 144, 145, 146, 147, 148, 149, 150, 151, 152, 153, 154, 155, 156, 157, 158, 159, 160, 161, 162, 163, 164, 165, 166, 167, 168, 169, 170, 171, 172, 173, 174, 175, 176, 177, 178, 179, 180, 181, 182, 183, 184, 185, 186, 187, 188, 189, 190, 191, 192, 193, 194, 195, 196, 197, 198, 199, 200, 201, 202, 203, 204, 205, 206, 207, 208, 209, 210, 211, 212, 213, 214, 215, 216, 217, 218, 219, 220, 221, 222, 223, 224, 225, 226, 227, 228, 229, 230, 231, 232, 233, 234, 235, 236, 237, 238, 239, 240, 241, 242, 243, 244, 245, 246, 247, 248, 249, 250, 251, 252, 253, 254, 255, 256, 257, 258, 259, 260, 261, 262, 263, 264, 265, 266, 267, 268, 269, 270, 271, 272, 273, 274, 275, 276, 277, 278, 279, 280, 281, 282, 283, 284, 285, 286, 287, 288, 289, 290, 291, 292, 293, 294, 295, 296, 297, 298, 299, 300, 301, 312, or 313, a variant, derivative, orthologue, paralogue or homologue thereof, in which:

[1004] the amino acid at Mutated site 4 is Gin, and the amino acid at Mutated site 5 is Trp.

[1005] In another preferred embodiment, the mutated PPO comprises a sequence of SEQ ID NO: 1, 2, 3, 4, 5, 6, 7, 8, 9, 10, 11, 12, 13, 14, 15, 16, 17, 18, 19, 20, 21, 22, 23, 24, 25, 26, 27, 28, 29, 30, 31, 32, 33, 34, 35, 36, 37, 38, 39, 40, 41, 42, 43, 44, 45, 46, 47, 48, 49, 50, 51, 52, 53, 54, 55, 56, 57, 58, 59, 60, 61, 62, 63, 64, 65, 66, 67, 68, 69, 70, 71, 72, 73, 74, 75, 76, 77, 78, 79, 80, 81, 82, 83, 84, 85, 86, 87, 88, 89, 90, 91, 92, 93, 94, 95, 96, 97, 98, 99, 100, 101, 102, 103, 104, 105, 106, 107, 108, 109, 110, 111, 112, 113, 114, 115, 116, 117, 118, 119, 120, 121, 122, 123, 124, 125, 126, 127, 128, 129, 130, 131, 132, 133, 134, 135, 136, 137, 138, 139, 140, 141, 142, 143, 144, 145, 146, 147, 148, 149, 150, 151, 152, 153, 154, 155, 156, 157, 158, 159, 160, 161, 162, 163, 164, 165, 166, 167, 168, 169, 170, 171, 172, 173, 174, 175, 176, 177, 178, 179, 180, 181, 182, 183, 184, 185, 186, 187, 188, 189, 190, 191, 192, 193, 194, 195, 196, 197, 198, 199, 200, 201, 202, 203, 204, 205, 206, 207, 208, 209, 210, 211, 212, 213, 214, 215, 216, 217, 218, 219, 220, 221, 222, 223, 224, 225, 226, 227, 228, 229, 230, 231, 232, 233, 234, 235, 236, 237, 238, 239, 240, 241, 242, 243, 244, 245, 246, 247, 248, 249, 250, 251, 252, 253, 254, 255, 256, 257, 258, 259, 260, 261, 262, 263, 264, 265, 266, 267, 268, 269, 270, 271, 272, 273, 274, 275, 276, 277, 278, 279, 280, 281, 282, 283, 284, 285, 286, 287, 288, 289, 290, 291, 292, 293, 294, 295, 296, 297, 298, 299, 300, 301, 312, or 313, a variant, derivative, orthologue, paralogue or homologue thereof, in which:

[1006] the amino acid at Mutated site 4 is Cys, and the amino acid at Mutated site 5 is Ala.

[1007] In another preferred embodiment, the mutated PPO comprises a sequence of SEQ ID NO: 1, 2, 3, 4, 5, 6, 7, 8, 9, 10, 11, 12, 13, 14, 15, 16, 17, 18, 19, 20, 21, 22, 23, 24, 25, 26, 27, 28, 29, 30, 31, 32, 33, 34, 35, 36, 37, 38, 39, 40, 41, 42, 43, 44, 45, 46, 47, 48, 49, 50, 51, 52, 53, 54, 55, 56, 57, 58, 59, 60, 61, 62, 63, 64, 65, 66, 67, 68, 69, 70, 71, 72, 73, 74, 75, 76, 77, 78, 79, 80, 81, 82, 83, 84, 85, 86, 87, 88, 89, 90, 91, 92, 93, 94, 95, 96, 97, 98, 99, 100, 101, 102, 103, 104, 105, 106, 107, 108, 109, 110, 111, 112, 113, 114, 115, 116, 117, 118, 119, 120, 121, 122, 123, 124, 125, 126, 127, 128, 129, 130, 131, 132, 133, 134, 135, 136, 137, 138, 139, 140, 141, 142, 143, 144, 145, 146, 147, 148, 149, 150, 151, 152, 153, 154, 155, 156, 157, 158, 159, 160, 161, 162, 163, 164, 165, 166, 167, 168, 169, 170, 171, 172, 173, 174, 175, 176, 177, 178, 179, 180, 181, 182, 183, 184, 185, 186, 187, 188, 189, 190, 191, 192, 193, 194, 195, 196, 197, 198, 199, 200, 201, 202, 203, 204, 205, 206, 207, 208, 209, 210, 211, 212, 213, 214, 215, 216, 217, 218, 219, 220, 221, 222, 223, 224, 225, 226, 227, 228, 229, 230, 231, 232, 233, 234, 235, 236, 237, 238, 239, 240, 241, 242, 243, 244, 245, 246, 247, 248, 249, 250, 251, 252, 253, 254, 255, 256, 257, 258, 259, 260, 261, 262, 263, 264, 265, 266, 267, 268, 269, 270, 271, 272, 273, 274, 275, 276, 277, 278, 279, 280, 281, 282, 283, 284, 285, 286, 287, 288, 289, 290, 291, 292, 293, 294, 295, 296, 297, 298, 299, 300, 301, 312, or 313, a variant, derivative, orthologue, paralogue or homologue thereof, in which:

[1008] the amino acid at Mutated site 4 is Cys, and the amino acid at Mutated site 5 is Leu.

[1009] In another preferred embodiment, the mutated PPO comprises a sequence of SEQ ID NO: 1, 2, 3, 4, 5, 6, 7, 8, 9, 10, 11, 12, 13, 14, 15, 16, 17, 18, 19, 20, 21, 22, 23, 24, 25, 26, 27, 28, 29, 30, 31, 32, 33, 34, 35, 36, 37, 38, 39, 40, 41, 42, 43, 44, 45, 46, 47, 48, 49, 50, 51, 52, 53, 54, 55, 56, 57, 58, 59, 60, 61, 62, 63, 64, 65, 66, 67, 68, 69, 70, 71, 72, 73, 74, 75, 76, 77, 78, 79, 80, 81, 82, 83, 84, 85, 86, 87, 88, 89, 90, 91, 92, 93, 94, 95, 96, 97, 98, 99, 100, 101, 102, 103, 104, 105, 106, 107, 108, 109, 110, 111, 112, 113, 114, 115, 116, 117, 118, 119, 120, 121, 122, 123, 124, 125, 126, 127, 128, 129, 130, 131, 132, 133, 134, 135, 136, 137, 138, 139, 140, 141, 142, 143, 144, 145, 146, 147, 148, 149, 150, 151, 152, 153, 154, 155, 156, 157, 158, 159, 160, 161, 162, 163, 164, 165, 166, 167, 168, 169, 170, 171, 172, 173, 174, 175, 176, 177, 178, 179, 180, 181, 182, 183, 184, 185, 186, 187, 188, 189, 190, 191, 192, 193, 194, 195, 196, 197, 198, 199, 200, 201, 202, 203, 204, 205, 206, 207, 208, 209, 210, 211, 212, 213, 214, 215, 216, 217, 218, 219, 220, 221, 222, 223, 224, 225, 226, 227, 228, 229, 230, 231, 232, 233, 234, 235, 236, 237, 238, 239, 240, 241, 242, 243, 244, 245, 246, 247, 248, 249, 250, 251, 252, 253, 254, 255, 256, 257, 258, 259, 260, 261, 262, 263, 264, 265, 266, 267, 268, 269, 270, 271, 272, 273, 274, 275, 276, 277, 278, 279, 280, 281, 282, 283, 284, 285, 286, 287, 288, 289, 290, 291, 292, 293, 294, 295, 296, 297, 298, 299, 300, 301, 312, or 313, a variant, derivative, orthologue, paralogue or homologue thereof, in which:

[1010] the amino acid at Mutated site 4 is Cys, and the amino acid at Mutated site 5 is Val.

[1011] In another preferred embodiment, the mutated PPO comprises a sequence of SEQ ID NO: 1, 2, 3, 4, 5, 6, 7, 8, 9, 10, 11, 12, 13, 14, 15, 16, 17, 18, 19, 20, 21, 22, 23, 24, 25, 26, 27, 28, 29, 30, 31, 32, 33, 34, 35, 36, 37, 38, 39, 40, 41, 42, 43, 44, 45, 46, 47, 48, 49, 50, 51, 52, 53, 54, 55, 56, 57, 58, 59, 60, 61, 62, 63, 64, 65, 66, 67, 68, 69, 70, 71, 72, 73, 74, 75, 76, 77, 78, 79, 80, 81, 82, 83, 84, 85, 86, 87, 88, 89, 90, 91, 92, 93, 94, 95, 96, 97, 98, 99, 100, 101, 102, 103, 104, 105, 106, 107, 108, 109, 110, 111, 112, 113, 114, 115, 116, 117, 118, 119, 120, 121, 122, 123, 124, 125, 126, 127, 128, 129, 130, 131, 132, 133, 134, 135, 136, 137, 138, 139, 140, 141, 142, 143, 144, 145, 146, 147, 148, 149, 150, 151, 152, 153, 154, 155, 156, 157, 158, 159, 160, 161, 162, 163, 164, 165, 166, 167, 168, 169, 170, 171, 172, 173, 174, 175, 176, 177, 178, 179, 180, 181, 182, 183, 184, 185, 186, 187, 188, 189, 190, 191, 192, 193, 194, 195, 196, 197, 198, 199, 200, 201, 202, 203, 204, 205, 206, 207, 208, 209, 210, 211, 212, 213, 214, 215, 216, 217, 218, 219, 220, 221, 222, 223, 224, 225, 226, 227, 228, 229, 230, 231, 232, 233, 234, 235, 236, 237, 238, 239, 240, 241, 242, 243, 244, 245, 246, 247, 248, 249, 250, 251, 252, 253, 254, 255, 256, 257, 258, 259, 260, 261, 262, 263, 264, 265, 266, 267, 268, 269, 270, 271, 272, 273, 274, 275, 276, 277, 278, 279, 280, 281, 282, 283, 284, 285, 286, 287, 288, 289, 290, 291, 292, 293, 294, 295, 296, 297, 298, 299, 300, 301, 312, or 313, a variant, derivative, orthologue, paralogue or homologue thereof, in which:

[1012] the amino acid at Mutated site 4 is Cys, and the amino acid at Mutated site 5 is Ile.

[1013] In another preferred embodiment, the mutated PPO comprises a sequence of SEQ ID NO: 1, 2, 3, 4, 5, 6, 7, 8, 9, 10, 11, 12, 13, 14, 15, 16, 17, 18, 19, 20, 21, 22, 23, 24, 25, 26, 27, 28, 29, 30, 31, 32, 33, 34, 35, 36, 37, 38, 39, 40, 41, 42, 43, 44, 45, 46, 47, 48, 49, 50, 51, 52, 53, 54, 55, 56, 57, 58, 59, 60, 61, 62, 63, 64, 65, 66, 67, 68, 69, 70, 71, 72, 73, 74, 75, 76, 77, 78, 79, 80, 81, 82, 83, 84, 85, 86, 87, 88, 89, 90, 91, 92, 93, 94, 95, 96, 97, 98, 99, 100, 101, 102, 103, 104, 105, 106, 107, 108, 109, 110, 111, 112, 113, 114, 115, 116, 117, 118, 119, 120, 121, 122, 123, 124, 125, 126, 127, 128, 129, 130, 131, 132, 133, 134, 135, 136, 137, 138, 139, 140, 141, 142, 143, 144, 145, 146, 147, 148, 149, 150, 151, 152, 153, 154, 155, 156, 157, 158, 159, 160, 161, 162, 163, 164, 165, 166, 167, 168, 169, 170, 171, 172, 173, 174, 175, 176, 177, 178, 179, 180, 181, 182, 183, 184, 185, 186, 187, 188, 189, 190, 191, 192, 193, 194, 195, 196, 197, 198, 199, 200, 201, 202, 203, 204, 205, 206, 207, 208, 209, 210, 211, 212, 213, 214, 215, 216, 217, 218, 219, 220, 221, 222, 223, 224, 225, 226, 227, 228, 229, 230, 231, 232, 233, 234, 235, 236, 237, 238, 239, 240, 241, 242, 243, 244, 245, 246, 247, 248, 249, 250, 251, 252, 253, 254, 255, 256, 257, 258, 259, 260, 261, 262, 263, 264, 265, 266, 267, 268, 269, 270, 271, 272, 273, 274, 275, 276, 277, 278, 279, 280, 281, 282, 283, 284, 285, 286, 287, 288, 289, 290, 291, 292, 293, 294, 295, 296, 297, 298, 299, 300, 301, 312, or 313, a variant, derivative, orthologue, paralogue or homologue thereof, in which:

[1014] the amino acid at Mutated site 4 is Cys, and the amino acid at Mutated site 5 is Met.

[1015] In another preferred embodiment, the mutated PPO comprises a sequence of SEQ ID NO: 1, 2, 3, 4, 5, 6, 7, 8, 9, 10, 11, 12, 13, 14, 15, 16, 17, 18, 19, 20, 21, 22, 23, 24, 25, 26, 27, 28, 29, 30, 31, 32, 33, 34, 35, 36, 37, 38, 39, 40, 41, 42, 43, 44, 45, 46, 47, 48, 49, 50, 51, 52, 53, 54, 55, 56, 57, 58, 59, 60, 61, 62, 63, 64, 65, 66, 67, 68, 69, 70, 71, 72, 73, 74, 75, 76, 77, 78, 79, 80, 81, 82, 83, 84, 85, 86, 87, 88, 89, 90, 91, 92, 93, 94, 95, 96, 97, 98, 99, 100, 101, 102, 103, 104, 105, 106, 107, 108, 109, 110, 111, 112, 113, 114, 115, 116, 117, 118, 119, 120, 121, 122, 123, 124, 125, 126, 127, 128, 129, 130, 131, 132, 133, 134, 135, 136, 137, 138, 139, 140, 141, 142, 143, 144, 145, 146, 147, 148, 149, 150, 151, 152, 153, 154, 155, 156, 157, 158, 159, 160, 161, 162, 163, 164, 165, 166, 167, 168, 169, 170, 171, 172, 173, 174, 175, 176, 177, 178, 179, 180, 181, 182, 183, 184, 185, 186, 187, 188, 189, 190, 191, 192, 193, 194, 195, 196, 197, 198, 199, 200, 201, 202, 203, 204, 205, 206, 207, 208, 209, 210, 211, 212, 213, 214, 215, 216, 217, 218, 219, 220, 221, 222, 223, 224, 225, 226, 227, 228, 229, 230, 231, 232, 233, 234, 235, 236, 237, 238, 239, 240, 241, 242, 243, 244, 245, 246, 247, 248, 249, 250, 251, 252, 253, 254, 255, 256, 257, 258, 259, 260, 261, 262, 263, 264, 265, 266, 267, 268, 269, 270, 271, 272, 273, 274, 275, 276, 277, 278, 279, 280, 281, 282, 283, 284, 285, 286, 287, 288, 289, 290, 291, 292, 293, 294, 295, 296, 297, 298, 299, 300, 301, 312, or 313, a variant, derivative, orthologue, paralogue or homologue thereof, in which:

[1016] the amino acid at Mutated site 4 is Cys, and the amino acid at Mutated site 5 is His.

[1017] In another preferred embodiment, the mutated PPO comprises a sequence of SEQ ID NO: 1, 2, 3, 4, 5, 6, 7, 8, 9, 10, 11, 12, 13, 14, 15, 16, 17, 18, 19, 20, 21, 22, 23, 24, 25, 26, 27, 28, 29, 30, 31, 32, 33, 34, 35, 36, 37, 38, 39, 40, 41, 42, 43, 44, 45, 46, 47, 48, 49, 50, 51, 52, 53, 54, 55, 56, 57, 58, 59, 60, 61, 62, 63, 64, 65, 66, 67, 68, 69, 70, 71, 72, 73, 74, 75, 76, 77, 78, 79, 80, 81, 82, 83, 84, 85, 86, 87, 88, 89, 90, 91, 92, 93, 94, 95, 96, 97, 98, 99, 100, 101, 102, 103, 104, 105, 106, 107, 108, 109, 110, 111, 112, 113, 114, 115, 116, 117, 118, 119, 120, 121, 122, 123, 124, 125, 126, 127, 128, 129, 130, 131, 132, 133, 134, 135, 136, 137, 138, 139, 140, 141, 142, 143, 144, 145, 146, 147, 148, 149, 150, 151, 152, 153, 154, 155, 156, 157, 158, 159, 160, 161, 162, 163, 164, 165, 166, 167, 168, 169, 170, 171, 172, 173, 174, 175, 176, 177, 178, 179, 180, 181, 182, 183, 184, 185, 186, 187, 188, 189, 190, 191, 192, 193, 194, 195, 196, 197, 198, 199, 200, 201, 202, 203, 204, 205, 206, 207, 208, 209, 210, 211, 212, 213, 214, 215, 216, 217, 218, 219, 220, 221, 222, 223, 224, 225, 226, 227, 228, 229, 230, 231, 232, 233, 234, 235, 236, 237, 238, 239, 240, 241, 242, 243, 244, 245, 246, 247, 248, 249, 250, 251, 252, 253, 254, 255, 256, 257, 258, 259, 260, 261, 262, 263, 264, 265, 266, 267, 268, 269, 270, 271, 272, 273, 274, 275, 276, 277, 278, 279, 280, 281, 282, 283, 284, 285, 286, 287, 288, 289, 290, 291, 292, 293, 294, 295, 296, 297, 298, 299, 300, 301, 312, or 313, a variant, derivative, orthologue, paralogue or homologue thereof, in which:

[1018] the amino acid at Mutated site 4 is Cys, and the amino acid at Mutated site 5 is Lys.

[1019] In another preferred embodiment, the mutated PPO comprises a sequence of SEQ ID NO: 1, 2, 3, 4, 5, 6, 7, 8, 9, 10, 11, 12, 13, 14, 15, 16, 17, 18, 19, 20, 21, 22, 23, 24, 25, 26, 27, 28, 29, 30, 31, 32, 33, 34, 35, 36, 37, 38, 39, 40, 41, 42, 43, 44, 45, 46, 47, 48, 49, 50, 51, 52, 53, 54, 55, 56, 57, 58, 59, 60, 61, 62, 63, 64, 65, 66, 67, 68, 69, 70, 71, 72, 73, 74, 75, 76, 77, 78, 79, 80, 81, 82, 83, 84, 85, 86, 87, 88, 89, 90, 91, 92, 93, 94, 95, 96, 97, 98, 99, 100, 101, 102, 103, 104, 105, 106, 107, 108, 109, 110, 111, 112, 113, 114, 115, 116, 117, 118, 119, 120, 121, 122, 123, 124, 125, 126, 127, 128, 129, 130, 131, 132, 133, 134, 135, 136, 137, 138, 139, 140, 141, 142, 143, 144, 145, 146, 147, 148, 149, 150, 151, 152, 153, 154, 155, 156, 157, 158, 159, 160, 161, 162, 163, 164, 165, 166, 167, 168, 169, 170, 171, 172, 173, 174, 175, 176, 177, 178, 179, 180, 181, 182, 183, 184, 185, 186, 187, 188, 189, 190, 191, 192, 193, 194, 195, 196, 197, 198, 199, 200, 201, 202, 203, 204, 205, 206, 207, 208, 209, 210, 211, 212, 213, 214, 215, 216, 217, 218, 219, 220, 221, 222, 223, 224, 225, 226, 227, 228, 229, 230, 231, 232, 233, 234, 235, 236, 237, 238, 239, 240, 241, 242, 243, 244, 245, 246, 247, 248, 249, 250, 251, 252, 253, 254, 255, 256, 257, 258, 259, 260, 261, 262, 263, 264, 265, 266, 267, 268, 269, 270, 271, 272, 273, 274, 275, 276, 277, 278, 279, 280, 281, 282, 283, 284, 285, 286, 287, 288, 289, 290, 291, 292, 293, 294, 295, 296, 297, 298, 299, 300, 301, 312, or 313, a variant, derivative, orthologue, paralogue or homologue thereof, in which:

[1020] the amino acid at Mutated site 4 is Cys, and the amino acid at Mutated site 5 is Asp.

[1021] In another preferred embodiment, the mutated PPO comprises a sequence of SEQ ID NO: 1, 2, 3, 4, 5, 6, 7, 8, 9, 10, 11, 12, 13, 14, 15, 16, 17, 18, 19, 20, 21, 22, 23, 24, 25, 26, 27, 28, 29, 30, 31, 32, 33, 34, 35, 36, 37, 38, 39, 40, 41, 42, 43, 44, 45, 46, 47, 48, 49, 50, 51, 52, 53, 54, 55, 56, 57, 58, 59, 60, 61, 62, 63, 64, 65, 66, 67, 68, 69, 70, 71, 72, 73, 74, 75, 76, 77, 78, 79, 80, 81, 82, 83, 84, 85, 86, 87, 88, 89, 90, 91, 92, 93, 94, 95, 96, 97, 98, 99, 100, 101, 102, 103, 104, 105, 106, 107, 108, 109, 110, 111, 112, 113, 114, 115, 116, 117, 118, 119, 120, 121, 122, 123, 124, 125, 126, 127, 128, 129, 130, 131, 132, 133, 134, 135, 136, 137, 138, 139, 140, 141, 142, 143, 144, 145, 146, 147, 148, 149, 150, 151, 152, 153, 154, 155, 156, 157, 158, 159, 160, 161, 162, 163, 164, 165, 166, 167, 168, 169, 170, 171, 172, 173, 174, 175, 176, 177, 178, 179, 180, 181, 182, 183, 184, 185, 186, 187, 188, 189, 190, 191, 192, 193, 194, 195, 196, 197, 198, 199, 200, 201, 202, 203, 204, 205, 206, 207, 208, 209, 210, 211, 212, 213, 214, 215, 216, 217, 218, 219, 220, 221, 222, 223, 224, 225, 226, 227, 228, 229, 230, 231, 232, 233, 234, 235, 236, 237, 238, 239, 240, 241, 242, 243, 244, 245, 246, 247, 248, 249, 250, 251, 252, 253, 254, 255, 256, 257, 258, 259, 260, 261, 262, 263, 264, 265, 266, 267, 268, 269, 270, 271, 272, 273, 274, 275, 276, 277, 278, 279, 280, 281, 282, 283, 284, 285, 286, 287, 288, 289, 290, 291, 292, 293, 294, 295, 296, 297, 298, 299, 300, 301, 312, or 313, a variant, derivative, orthologue, paralogue or homologue thereof, in which:

[1022] the amino acid at Mutated site 4 is Cys, and the amino acid at Mutated site 5 is Glu.

[1023] In another preferred embodiment, the mutated PPO comprises a sequence of SEQ ID NO: 1, 2, 3, 4, 5, 6, 7, 8, 9, 10, 11, 12, 13, 14, 15, 16, 17, 18, 19, 20, 21, 22, 23, 24, 25, 26, 27, 28, 29, 30, 31, 32, 33, 34, 35, 36, 37, 38, 39, 40, 41, 42, 43, 44, 45, 46, 47, 48, 49, 50, 51, 52, 53, 54, 55, 56, 57, 58, 59, 60, 61, 62, 63, 64, 65, 66, 67, 68, 69, 70, 71, 72, 73, 74, 75, 76, 77, 78, 79, 80, 81, 82, 83, 84, 85, 86, 87, 88, 89, 90, 91, 92, 93, 94, 95, 96, 97, 98, 99, 100, 101, 102, 103, 104, 105, 106, 107, 108, 109, 110, 111, 112, 113, 114, 115, 116, 117, 118, 119, 120, 121, 122, 123, 124, 125, 126, 127, 128, 129, 130, 131, 132, 133, 134, 135, 136, 137, 138, 139, 140, 141, 142, 143, 144, 145, 146, 147, 148, 149, 150, 151, 152, 153, 154, 155, 156, 157, 158, 159, 160, 161, 162, 163, 164, 165, 166, 167, 168, 169, 170, 171, 172, 173, 174, 175, 176, 177, 178, 179, 180, 181, 182, 183, 184, 185, 186, 187, 188, 189, 190, 191, 192, 193, 194, 195, 196, 197, 198, 199, 200, 201, 202, 203, 204, 205, 206, 207, 208, 209, 210, 211, 212, 213, 214, 215, 216, 217, 218, 219, 220, 221, 222, 223, 224, 225, 226, 227, 228, 229, 230, 231, 232, 233, 234, 235, 236, 237, 238, 239, 240, 241, 242, 243, 244, 245, 246, 247, 248, 249, 250, 251, 252, 253, 254, 255, 256, 257, 258, 259, 260, 261, 262, 263, 264, 265, 266, 267, 268, 269, 270, 271, 272, 273, 274, 275, 276, 277, 278, 279, 280, 281, 282, 283, 284, 285, 286, 287, 288, 289, 290, 291, 292, 293, 294, 295, 296, 297, 298, 299, 300, 301, 312, or 313, a variant, derivative, orthologue, paralogue or homologue thereof, in which:

[1024] the amino acid at Mutated site 4 is Cys, and the amino acid at Mutated site 5 is Ser.

[1025] In another preferred embodiment, the mutated PPO comprises a sequence of SEQ ID NO: 1, 2, 3, 4, 5, 6, 7, 8, 9, 10, 11, 12, 13, 14, 15, 16, 17, 18, 19, 20, 21, 22, 23, 24, 25, 26, 27, 28, 29, 30, 31, 32, 33, 34, 35, 36, 37, 38, 39, 40, 41, 42, 43, 44, 45, 46, 47, 48, 49, 50, 51, 52, 53, 54, 55, 56, 57, 58, 59, 60, 61, 62, 63, 64, 65, 66, 67, 68, 69, 70, 71, 72, 73, 74, 75, 76, 77, 78, 79, 80, 81, 82, 83, 84, 85, 86, 87, 88, 89, 90, 91, 92, 93, 94, 95, 96, 97, 98, 99, 100, 101, 102, 103, 104, 105, 106, 107, 108, 109, 110, 111, 112, 113, 114, 115, 116, 117, 118, 119, 120, 121, 122, 123, 124, 125, 126, 127, 128, 129, 130, 131, 132, 133, 134, 135, 136, 137, 138, 139, 140, 141, 142, 143, 144, 145, 146, 147, 148, 149, 150, 151, 152, 153, 154, 155, 156, 157, 158, 159, 160, 161, 162, 163, 164, 165, 166, 167, 168, 169, 170, 171, 172, 173, 174, 175, 176, 177, 178, 179, 180, 181, 182, 183, 184, 185, 186, 187, 188, 189, 190, 191, 192, 193, 194, 195, 196, 197, 198, 199, 200, 201, 202, 203, 204, 205, 206, 207, 208, 209, 210, 211, 212, 213, 214, 215, 216, 217, 218, 219, 220, 221, 222, 223, 224, 225, 226, 227, 228, 229, 230, 231, 232, 233, 234, 235, 236, 237, 238, 239, 240, 241, 242, 243, 244, 245, 246, 247, 248, 249, 250, 251, 252, 253, 254, 255, 256, 257, 258, 259, 260, 261, 262, 263, 264, 265, 266, 267, 268, 269, 270, 271, 272, 273, 274, 275, 276, 277, 278, 279, 280, 281, 282, 283, 284, 285, 286, 287, 288, 289, 290, 291, 292, 293, 294, 295, 296, 297, 298, 299, 300, 301, 312, or 313, a variant, derivative, orthologue, paralogue or homologue thereof, in which:

[1026] the amino acid at Mutated site 4 is Cys, and the amino acid at Mutated site 5 is Thr.

[1027] In another preferred embodiment, the mutated PPO comprises a sequence of SEQ ID NO: 1, 2, 3, 4, 5, 6, 7, 8, 9, 10, 11, 12, 13, 14, 15, 16, 17, 18, 19, 20, 21, 22, 23, 24, 25, 26, 27, 28, 29, 30, 31, 32, 33, 34, 35, 36, 37, 38, 39, 40, 41, 42, 43, 44, 45, 46, 47, 48, 49, 50, 51, 52, 53, 54, 55, 56, 57, 58, 59, 60, 61, 62, 63, 64, 65, 66, 67, 68, 69, 70, 71, 72, 73, 74, 75, 76, 77, 78, 79, 80, 81, 82, 83, 84, 85, 86, 87, 88, 89, 90, 91, 92, 93, 94, 95, 96, 97, 98, 99, 100, 101, 102, 103, 104, 105, 106, 107, 108, 109, 110, 111, 112, 113, 114, 115, 116, 117, 118, 119, 120, 121, 122, 123, 124, 125, 126, 127, 128, 129, 130, 131, 132, 133, 134, 135, 136, 137, 138, 139, 140, 141, 142, 143, 144, 145, 146, 147, 148, 149, 150, 151, 152, 153, 154, 155, 156, 157, 158, 159, 160, 161, 162, 163, 164, 165, 166, 167, 168, 169, 170, 171, 172, 173, 174, 175, 176, 177, 178, 179, 180, 181, 182, 183, 184, 185, 186, 187, 188, 189, 190, 191, 192, 193, 194, 195, 196, 197, 198, 199, 200, 201, 202, 203, 204, 205, 206, 207, 208, 209, 210, 211, 212, 213, 214, 215, 216, 217, 218, 219, 220, 221, 222, 223, 224, 225, 226, 227, 228, 229, 230, 231, 232, 233, 234, 235, 236, 237, 238, 239, 240, 241, 242, 243, 244, 245, 246, 247, 248, 249, 250, 251, 252, 253, 254, 255, 256, 257, 258, 259, 260, 261, 262, 263, 264, 265, 266, 267, 268, 269, 270, 271, 272, 273, 274, 275, 276, 277, 278, 279, 280, 281, 282, 283, 284, 285, 286, 287, 288, 289, 290, 291, 292, 293, 294, 295, 296, 297, 298, 299, 300, 301, 312, or 313, a variant, derivative, orthologue, paralogue or homologue thereof, in which:

[1028] the amino acid at Mutated site 4 is Cys, and the amino acid at Mutated site 5 is Asn.

[1029] In another preferred embodiment, the mutated PPO comprises a sequence of SEQ ID NO: 1, 2, 3, 4, 5, 6, 7, 8, 9, 10, 11, 12, 13, 14, 15, 16, 17, 18, 19, 20, 21, 22, 23, 24, 25, 26, 27, 28, 29, 30, 31, 32, 33, 34, 35, 36, 37, 38, 39, 40, 41, 42, 43, 44, 45, 46, 47, 48, 49, 50, 51, 52, 53, 54, 55, 56, 57, 58, 59, 60, 61, 62, 63, 64, 65, 66, 67, 68, 69, 70, 71, 72, 73, 74, 75, 76, 77, 78, 79, 80, 81, 82, 83, 84, 85, 86, 87, 88, 89, 90, 91, 92, 93, 94, 95, 96, 97, 98, 99, 100, 101, 102, 103, 104, 105, 106, 107, 108, 109, 110, 111, 112, 113, 114, 115, 116, 117, 118, 119, 120, 121, 122, 123, 124, 125, 126, 127, 128, 129, 130, 131, 132, 133, 134, 135, 136, 137, 138, 139, 140, 141, 142, 143, 144, 145, 146, 147, 148, 149, 150, 151, 152, 153, 154, 155, 156, 157, 158, 159, 160, 161, 162, 163, 164, 165, 166, 167, 168, 169, 170, 171, 172, 173, 174, 175, 176, 177, 178, 179, 180, 181, 182, 183, 184, 185, 186, 187, 188, 189, 190, 191, 192, 193, 194, 195, 196, 197, 198, 199, 200, 201, 202, 203, 204, 205, 206, 207, 208, 209, 210, 211, 212, 213, 214, 215, 216, 217, 218, 219, 220, 221, 222, 223, 224, 225, 226, 227, 228, 229, 230, 231, 232, 233, 234, 235, 236, 237, 238, 239, 240, 241, 242, 243, 244, 245, 246, 247, 248, 249, 250, 251, 252, 253, 254, 255, 256, 257, 258, 259, 260, 261, 262, 263, 264, 265, 266, 267, 268, 269, 270, 271, 272, 273, 274, 275, 276, 277, 278, 279, 280, 281, 282, 283, 284, 285, 286, 287, 288, 289, 290, 291, 292, 293, 294, 295, 296, 297, 298, 299, 300, 301, 312, or 313, a variant, derivative, orthologue, paralogue or homologue thereof, in which:

[1030] the amino acid at Mutated site 4 is Cys, and the amino acid at Mutated site 5 is Gin.

[1031] In another preferred embodiment, the mutated PPO comprises a sequence of SEQ ID NO: 1, 2, 3, 4, 5, 6, 7, 8, 9, 10, 11, 12, 13, 14, 15, 16, 17, 18, 19, 20, 21, 22, 23, 24, 25, 26, 27, 28, 29, 30, 31, 32, 33, 34, 35, 36, 37, 38, 39, 40, 41, 42, 43, 44, 45, 46, 47, 48, 49, 50, 51, 52, 53, 54, 55, 56, 57, 58, 59, 60, 61, 62, 63, 64, 65, 66, 67, 68, 69, 70, 71, 72, 73, 74, 75, 76, 77, 78, 79, 80, 81, 82, 83, 84, 85, 86, 87, 88, 89, 90, 91, 92, 93, 94, 95, 96, 97, 98, 99, 100, 101, 102, 103, 104, 105, 106, 107, 108, 109, 110, 111, 112, 113, 114, 115, 116, 117, 118, 119, 120, 121, 122, 123, 124, 125, 126, 127, 128, 129, 130, 131, 132, 133, 134, 135, 136, 137, 138, 139, 140, 141, 142, 143, 144, 145, 146, 147, 148, 149, 150, 151, 152, 153, 154, 155, 156, 157, 158, 159, 160, 161, 162, 163, 164, 165, 166, 167, 168, 169, 170, 171, 172, 173, 174, 175, 176, 177, 178, 179, 180, 181, 182, 183, 184, 185, 186, 187, 188, 189, 190, 191, 192, 193, 194, 195, 196, 197, 198, 199, 200, 201, 202, 203, 204, 205, 206, 207, 208, 209, 210, 211, 212, 213, 214, 215, 216, 217, 218, 219, 220, 221, 222, 223, 224, 225, 226, 227, 228, 229, 230, 231, 232, 233, 234, 235, 236, 237, 238, 239, 240, 241, 242, 243, 244, 245, 246, 247, 248, 249, 250, 251, 252, 253, 254, 255, 256, 257, 258, 259, 260, 261, 262, 263, 264, 265, 266, 267, 268, 269, 270, 271, 272, 273, 274, 275, 276, 277, 278, 279, 280, 281, 282, 283, 284, 285, 286, 287, 288, 289, 290, 291, 292, 293, 294, 295, 296, 297, 298, 299, 300, 301, 312, or 313, a variant, derivative, orthologue, paralogue or homologue thereof, in which:

[1032] the amino acid at Mutated site 4 is Cys, and the amino acid at Mutated site 5 is Cys.

[1033] In another preferred embodiment, the mutated PPO comprises a sequence of SEQ ID NO: 1, 2, 3, 4, 5, 6, 7, 8, 9, 10, 11, 12, 13, 14, 15, 16, 17, 18, 19, 20, 21, 22, 23, 24, 25, 26, 27, 28, 29, 30, 31, 32, 33, 34, 35, 36, 37, 38, 39, 40, 41, 42, 43, 44, 45, 46, 47, 48, 49, 50, 51, 52, 53, 54, 55, 56, 57, 58, 59, 60, 61, 62, 63, 64, 65, 66, 67, 68, 69, 70, 71, 72, 73, 74, 75, 76, 77, 78, 79, 80, 81, 82, 83, 84, 85, 86, 87, 88, 89, 90, 91, 92, 93, 94, 95, 96, 97, 98, 99, 100, 101, 102, 103, 104, 105, 106, 107, 108, 109, 110, 111, 112, 113, 114, 115, 116, 117, 118, 119, 120, 121, 122, 123, 124, 125, 126, 127, 128, 129, 130, 131, 132, 133, 134, 135, 136, 137, 138, 139, 140, 141, 142, 143, 144, 145, 146, 147, 148, 149, 150, 151, 152, 153, 154, 155, 156, 157, 158, 159, 160, 161, 162, 163, 164, 165, 166, 167, 168, 169, 170, 171, 172, 173, 174, 175, 176, 177, 178, 179, 180, 181, 182, 183, 184, 185, 186, 187, 188, 189, 190, 191, 192, 193, 194, 195, 196, 197, 198, 199, 200, 201, 202, 203, 204, 205, 206, 207, 208, 209, 210, 211, 212, 213, 214, 215, 216, 217, 218, 219, 220, 221, 222, 223, 224, 225, 226, 227, 228, 229, 230, 231, 232, 233, 234, 235, 236, 237, 238, 239, 240, 241, 242, 243, 244, 245, 246, 247, 248, 249, 250, 251, 252, 253, 254, 255, 256, 257, 258, 259, 260, 261, 262, 263, 264, 265, 266, 267, 268, 269, 270, 271, 272, 273, 274, 275, 276, 277, 278, 279, 280, 281, 282, 283, 284, 285, 286, 287, 288, 289, 290, 291, 292, 293, 294, 295, 296, 297, 298, 299, 300, 301, 312, or 313, a variant, derivative, orthologue, paralogue or homologue thereof, in which:

[1034] the amino acid at Mutated site 4 is Cys, and the amino acid at Mutated site 5 is Gly.

[1035] In another preferred embodiment, the mutated PPO comprises a sequence of SEQ ID NO: 1, 2, 3, 4, 5, 6, 7, 8, 9, 10, 11, 12, 13, 14, 15, 16, 17, 18, 19, 20, 21, 22, 23, 24, 25, 26, 27, 28, 29, 30, 31, 32, 33, 34, 35, 36, 37, 38, 39, 40, 41, 42, 43, 44, 45, 46, 47, 48, 49, 50, 51, 52, 53, 54, 55, 56, 57, 58, 59, 60, 61, 62, 63, 64, 65, 66, 67, 68, 69, 70, 71, 72, 73, 74, 75, 76, 77, 78, 79, 80, 81, 82, 83, 84, 85, 86, 87, 88, 89, 90, 91, 92, 93, 94, 95, 96, 97, 98, 99, 100, 101, 102, 103, 104, 105, 106, 107, 108, 109, 110, 111, 112, 113, 114, 115, 116, 117, 118, 119, 120, 121, 122, 123, 124, 125, 126, 127, 128, 129, 130, 131, 132, 133, 134, 135, 136, 137, 138, 139, 140, 141, 142, 143, 144, 145, 146, 147, 148, 149, 150, 151, 152, 153, 154, 155, 156, 157, 158, 159, 160, 161, 162, 163, 164, 165, 166, 167, 168, 169, 170, 171, 172, 173, 174, 175, 176, 177, 178, 179, 180, 181, 182, 183, 184, 185, 186, 187, 188, 189, 190, 191, 192, 193, 194, 195, 196, 197, 198, 199, 200, 201, 202, 203, 204, 205, 206, 207, 208, 209, 210, 211, 212, 213, 214, 215, 216, 217, 218, 219, 220, 221, 222, 223, 224, 225, 226, 227, 228, 229, 230, 231, 232, 233, 234, 235, 236, 237, 238, 239, 240, 241, 242, 243, 244, 245, 246, 247, 248, 249, 250, 251, 252, 253, 254, 255, 256, 257, 258, 259, 260, 261, 262, 263, 264, 265, 266, 267, 268, 269, 270, 271, 272, 273, 274, 275, 276, 277, 278, 279, 280, 281, 282, 283, 284, 285, 286, 287, 288, 289, 290, 291, 292, 293, 294, 295, 296, 297, 298, 299, 300, 301, 312, or 313, a variant, derivative, orthologue, paralogue or homologue thereof, in which:

[1036] the amino acid at Mutated site 4 is Cys, and the amino acid at Mutated site 5 is Pro.

[1037] In another preferred embodiment, the mutated PPO comprises a sequence of SEQ ID NO: 1, 2, 3, 4, 5, 6, 7, 8, 9, 10, 11, 12, 13, 14, 15, 16, 17, 18, 19, 20, 21, 22, 23, 24, 25, 26, 27, 28, 29, 30, 31, 32, 33, 34, 35, 36, 37, 38, 39, 40, 41, 42, 43, 44, 45, 46, 47, 48, 49, 50, 51, 52, 53, 54, 55, 56, 57, 58, 59, 60, 61, 62, 63, 64, 65, 66, 67, 68, 69, 70, 71, 72, 73, 74, 75, 76, 77, 78, 79, 80, 81, 82, 83, 84, 85, 86, 87, 88, 89, 90, 91, 92, 93, 94, 95, 96, 97, 98, 99, 100, 101, 102, 103, 104, 105, 106, 107, 108, 109, 110, 111, 112, 113, 114, 115, 116, 117, 118, 119, 120, 121, 122, 123, 124, 125, 126, 127, 128, 129, 130, 131, 132, 133, 134, 135, 136, 137, 138, 139, 140, 141, 142, 143, 144, 145, 146, 147, 148, 149, 150, 151, 152, 153, 154, 155, 156, 157, 158, 159, 160, 161, 162, 163, 164, 165, 166, 167, 168, 169, 170, 171, 172, 173, 174, 175, 176, 177, 178, 179, 180, 181, 182, 183, 184, 185, 186, 187, 188, 189, 190, 191, 192, 193, 194, 195, 196, 197, 198, 199, 200, 201, 202, 203, 204, 205, 206, 207, 208, 209, 210, 211, 212, 213, 214, 215, 216, 217, 218, 219, 220, 221, 222, 223, 224, 225, 226, 227, 228, 229, 230, 231, 232, 233, 234, 235, 236, 237, 238, 239, 240, 241, 242, 243, 244, 245, 246, 247, 248, 249, 250, 251, 252, 253, 254, 255, 256, 257, 258, 259, 260, 261, 262, 263, 264, 265, 266, 267, 268, 269, 270, 271, 272, 273, 274, 275, 276, 277, 278, 279, 280, 281, 282, 283, 284, 285, 286, 287, 288, 289, 290, 291, 292, 293, 294, 295, 296, 297, 298, 299, 300, 301, 312, or 313, a variant, derivative, orthologue, paralogue or homologue thereof, in which:

[1038] the amino acid at Mutated site 4 is Cys, and the amino acid at Mutated site 5 is Arg.

[1039] In another preferred embodiment, the mutated PPO comprises a sequence of SEQ ID NO: 1, 2, 3, 4, 5, 6, 7, 8, 9, 10, 11, 12, 13, 14, 15, 16, 17, 18, 19, 20, 21, 22, 23, 24, 25, 26, 27, 28, 29, 30, 31, 32, 33, 34, 35, 36, 37, 38, 39, 40, 41, 42, 43, 44, 45, 46, 47, 48, 49, 50, 51, 52, 53, 54, 55, 56, 57, 58, 59, 60, 61, 62, 63, 64, 65, 66, 67, 68, 69, 70, 71, 72, 73, 74, 75, 76, 77, 78, 79, 80, 81, 82, 83, 84, 85, 86, 87, 88, 89, 90, 91, 92, 93, 94, 95, 96, 97, 98, 99, 100, 101, 102, 103, 104, 105, 106, 107, 108, 109, 110, 111, 112, 113, 114, 115, 116, 117, 118, 119, 120, 121, 122, 123, 124, 125, 126, 127, 128, 129, 130, 131, 132, 133, 134, 135, 136, 137, 138, 139, 140, 141, 142, 143, 144, 145, 146, 147, 148, 149, 150, 151, 152, 153, 154, 155, 156, 157, 158, 159, 160, 161, 162, 163, 164, 165, 166, 167, 168, 169, 170, 171, 172, 173, 174, 175, 176, 177, 178, 179, 180, 181, 182, 183, 184, 185, 186, 187, 188, 189, 190, 191, 192, 193, 194, 195, 196, 197, 198, 199, 200, 201, 202, 203, 204, 205, 206, 207, 208, 209, 210, 211, 212, 213, 214, 215, 216, 217, 218, 219, 220, 221, 222, 223, 224, 225, 226, 227, 228, 229, 230, 231, 232, 233, 234, 235, 236, 237, 238, 239, 240, 241, 242, 243, 244, 245, 246, 247, 248, 249, 250, 251, 252, 253, 254, 255, 256, 257, 258, 259, 260, 261, 262, 263, 264, 265, 266, 267, 268, 269, 270, 271, 272, 273, 274, 275, 276, 277, 278, 279, 280, 281, 282, 283, 284, 285, 286, 287, 288, 289, 290, 291, 292, 293, 294, 295, 296, 297, 298, 299, 300, 301, 312, or 313, a variant, derivative, orthologue, paralogue or homologue thereof, in which:

[1040] the amino acid at Mutated site 4 is Cys, and the amino acid at Mutated site 5 is Tyr.

[1041] In another preferred embodiment, the mutated PPO comprises a sequence of SEQ ID NO: 1, 2, 3, 4, 5, 6, 7, 8, 9, 10, 11, 12, 13, 14, 15, 16, 17, 18, 19, 20, 21, 22, 23, 24, 25, 26, 27, 28, 29, 30, 31, 32, 33, 34, 35, 36, 37, 38, 39, 40, 41, 42, 43, 44, 45, 46, 47, 48, 49, 50, 51, 52, 53, 54, 55, 56, 57, 58, 59, 60, 61, 62, 63, 64, 65, 66, 67, 68, 69, 70, 71, 72, 73, 74, 75, 76, 77, 78, 79, 80, 81, 82, 83, 84, 85, 86, 87, 88, 89, 90, 91, 92, 93, 94, 95, 96, 97, 98, 99, 100, 101, 102, 103, 104, 105, 106, 107, 108, 109, 110, 111, 112, 113, 114, 115, 116, 117, 118, 119, 120, 121, 122, 123, 124, 125, 126, 127, 128, 129, 130, 131, 132, 133, 134, 135, 136, 137, 138, 139, 140, 141, 142, 143, 144, 145, 146, 147, 148, 149, 150, 151, 152, 153, 154, 155, 156, 157, 158, 159, 160, 161, 162, 163, 164, 165, 166, 167, 168, 169, 170, 171, 172, 173, 174, 175, 176, 177, 178, 179, 180, 181, 182, 183, 184, 185, 186, 187, 188, 189, 190, 191, 192, 193, 194, 195, 196, 197, 198, 199, 200, 201, 202, 203, 204, 205, 206, 207, 208, 209, 210, 211, 212, 213, 214, 215, 216, 217, 218, 219, 220, 221, 222, 223, 224, 225, 226, 227, 228, 229, 230, 231, 232, 233, 234, 235, 236, 237, 238, 239, 240, 241, 242, 243, 244, 245, 246, 247, 248, 249, 250, 251, 252, 253, 254, 255, 256, 257, 258, 259, 260, 261, 262, 263, 264, 265, 266, 267, 268, 269, 270, 271, 272, 273, 274, 275, 276, 277, 278, 279, 280, 281, 282, 283, 284, 285, 286, 287, 288, 289, 290, 291, 292, 293, 294, 295, 296, 297, 298, 299, 300, 301, 312, or 313, a variant, derivative, orthologue, paralogue or homologue thereof, in which:

[1042] the amino acid at Mutated site 4 is Cys, and the amino acid at Mutated site 5 is Trp.

[1043] In another preferred embodiment, the mutated PPO comprises a sequence of SEQ ID NO: 1, 2, 3, 4, 5, 6, 7, 8, 9, 10, 11, 12, 13, 14, 15, 16, 17, 18, 19, 20, 21, 22, 23, 24, 25, 26, 27, 28, 29, 30, 31, 32, 33, 34, 35, 36, 37, 38, 39, 40, 41, 42, 43, 44, 45, 46, 47, 48, 49, 50, 51, 52, 53, 54, 55, 56, 57, 58, 59, 60, 61, 62, 63, 64, 65, 66, 67, 68, 69, 70, 71, 72, 73, 74, 75, 76, 77, 78, 79, 80, 81, 82, 83, 84, 85, 86, 87, 88, 89, 90, 91, 92, 93, 94, 95, 96, 97, 98, 99, 100, 101, 102, 103, 104, 105, 106, 107, 108, 109, 110, 111, 112, 113, 114, 115, 116, 117, 118, 119, 120, 121, 122, 123, 124, 125, 126, 127, 128, 129, 130, 131, 132, 133, 134, 135, 136, 137, 138, 139, 140, 141, 142, 143, 144, 145, 146, 147, 148, 149, 150, 151, 152, 153, 154, 155, 156, 157, 158, 159, 160, 161, 162, 163, 164, 165, 166, 167, 168, 169, 170, 171, 172, 173, 174, 175, 176, 177, 178, 179, 180, 181, 182, 183, 184, 185, 186, 187, 188, 189, 190, 191, 192, 193, 194, 195, 196, 197, 198, 199, 200, 201, 202, 203, 204, 205, 206, 207, 208, 209, 210, 211, 212, 213, 214, 215, 216, 217, 218, 219, 220, 221, 222, 223, 224, 225, 226, 227, 228, 229, 230, 231, 232, 233, 234, 235, 236, 237, 238, 239, 240, 241, 242, 243, 244, 245, 246, 247, 248, 249, 250, 251, 252, 253, 254, 255, 256, 257, 258, 259, 260, 261, 262, 263, 264, 265, 266, 267, 268, 269, 270, 271, 272, 273, 274, 275, 276, 277, 278, 279, 280, 281, 282, 283, 284, 285, 286, 287, 288, 289, 290, 291, 292, 293, 294, 295, 296, 297, 298, 299, 300, 301, 312, or 313, a variant, derivative, orthologue, paralogue or homologue thereof, in which:

[1044] the amino acid at Mutated site 4 is Gly, and the amino acid at Mutated site 5 is Ala.

[1045] In another preferred embodiment, the mutated PPO comprises a sequence of SEQ ID NO: 1, 2, 3, 4, 5, 6, 7, 8, 9, 10, 11, 12, 13, 14, 15, 16, 17, 18, 19, 20, 21, 22, 23, 24, 25, 26, 27, 28, 29, 30, 31, 32, 33, 34, 35, 36, 37, 38, 39, 40, 41, 42, 43, 44, 45, 46, 47, 48, 49, 50, 51, 52, 53, 54, 55, 56, 57, 58, 59, 60, 61, 62, 63, 64, 65, 66, 67, 68, 69, 70, 71, 72, 73, 74, 75, 76, 77, 78, 79, 80, 81, 82, 83, 84, 85, 86, 87, 88, 89, 90, 91, 92, 93, 94, 95, 96, 97, 98, 99, 100, 101, 102, 103, 104, 105, 106, 107, 108, 109, 110, 111, 112, 113, 114, 115, 116, 117, 118, 119, 120, 121, 122, 123, 124, 125, 126, 127, 128, 129, 130, 131, 132, 133, 134, 135, 136, 137, 138, 139, 140, 141, 142, 143, 144, 145, 146, 147, 148, 149, 150, 151, 152, 153, 154, 155, 156, 157, 158, 159, 160, 161, 162, 163, 164, 165, 166, 167, 168, 169, 170, 171, 172, 173, 174, 175, 176, 177, 178, 179, 180, 181, 182, 183, 184, 185, 186, 187, 188, 189, 190, 191, 192, 193, 194, 195, 196, 197, 198, 199, 200, 201, 202, 203, 204, 205, 206, 207, 208, 209, 210, 211, 212, 213, 214, 215, 216, 217, 218, 219, 220, 221, 222, 223, 224, 225, 226, 227, 228, 229, 230, 231, 232, 233, 234, 235, 236, 237, 238, 239, 240, 241, 242, 243, 244, 245, 246, 247, 248, 249, 250, 251, 252, 253, 254, 255, 256, 257, 258, 259, 260, 261, 262, 263, 264, 265, 266, 267, 268, 269, 270, 271, 272, 273, 274, 275, 276, 277, 278, 279, 280, 281, 282, 283, 284, 285, 286, 287, 288, 289, 290, 291, 292, 293, 294, 295, 296, 297, 298, 299, 300, 301, 312, or 313, a variant, derivative, orthologue, paralogue or homologue thereof, in which:

[1046] the amino acid at Mutated site 4 is Gly, and the amino acid at Mutated site 5 is Leu.

[1047] In another preferred embodiment, the mutated PPO comprises a sequence of SEQ ID NO: 1, 2, 3, 4, 5, 6, 7, 8, 9, 10, 11, 12, 13, 14, 15, 16, 17, 18, 19, 20, 21, 22, 23, 24, 25, 26, 27, 28, 29, 30, 31, 32, 33, 34, 35, 36, 37, 38, 39, 40, 41, 42, 43, 44, 45, 46, 47, 48, 49, 50, 51, 52, 53, 54, 55, 56, 57, 58, 59, 60, 61, 62, 63, 64, 65, 66, 67, 68, 69, 70, 71, 72, 73, 74, 75, 76, 77, 78, 79, 80, 81, 82, 83, 84, 85, 86, 87, 88, 89, 90, 91, 92, 93, 94, 95, 96, 97, 98, 99, 100, 101, 102, 103, 104, 105, 106, 107, 108, 109, 110, 111, 112, 113, 114, 115, 116, 117, 118, 119, 120, 121, 122, 123, 124, 125, 126, 127, 128, 129, 130, 131, 132, 133, 134, 135, 136, 137, 138, 139, 140, 141, 142, 143, 144, 145, 146, 147, 148, 149, 150, 151, 152, 153, 154, 155, 156, 157, 158, 159, 160, 161, 162, 163, 164, 165, 166, 167, 168, 169, 170, 171, 172, 173, 174, 175, 176, 177, 178, 179, 180, 181, 182, 183, 184, 185, 186, 187, 188, 189, 190, 191, 192, 193, 194, 195, 196, 197, 198, 199, 200, 201, 202, 203, 204, 205, 206, 207, 208, 209, 210, 211, 212, 213, 214, 215, 216, 217, 218, 219, 220, 221, 222, 223, 224, 225, 226, 227, 228, 229, 230, 231, 232, 233, 234, 235, 236, 237, 238, 239, 240, 241, 242, 243, 244, 245, 246, 247, 248, 249, 250, 251, 252, 253, 254, 255, 256, 257, 258, 259, 260, 261, 262, 263, 264, 265, 266, 267, 268, 269, 270, 271, 272, 273, 274, 275, 276, 277, 278, 279, 280, 281, 282, 283, 284, 285, 286, 287, 288, 289, 290, 291, 292, 293, 294, 295, 296, 297, 298, 299, 300, 301, 312, or 313, a variant, derivative, orthologue, paralogue or homologue thereof, in which:

[1048] the amino acid at Mutated site 4 is Gly, and the amino acid at Mutated site 5 is Val.

[1049] In another preferred embodiment, the mutated PPO comprises a sequence of SEQ ID NO: 1, 2, 3, 4, 5, 6, 7, 8, 9, 10, 11, 12, 13, 14, 15, 16, 17, 18, 19, 20, 21, 22, 23, 24, 25, 26, 27, 28, 29, 30, 31, 32, 33, 34, 35, 36, 37, 38, 39, 40, 41, 42, 43, 44, 45, 46, 47, 48, 49, 50, 51, 52, 53, 54, 55, 56, 57, 58, 59, 60, 61, 62, 63, 64, 65, 66, 67, 68, 69, 70, 71, 72, 73, 74, 75, 76, 77, 78, 79, 80, 81, 82, 83, 84, 85, 86, 87, 88, 89, 90, 91, 92, 93, 94, 95, 96, 97, 98, 99, 100, 101, 102, 103, 104, 105, 106, 107, 108, 109, 110, 111, 112, 113, 114, 115, 116, 117, 118, 119, 120, 121, 122, 123, 124, 125, 126, 127, 128, 129, 130, 131, 132, 133, 134, 135, 136, 137, 138, 139, 140, 141, 142, 143, 144, 145, 146, 147, 148, 149, 150, 151, 152, 153, 154, 155, 156, 157, 158, 159, 160, 161, 162, 163, 164, 165, 166, 167, 168, 169, 170, 171, 172, 173, 174, 175, 176, 177, 178, 179, 180, 181, 182, 183, 184, 185, 186, 187, 188, 189, 190, 191, 192, 193, 194, 195, 196, 197, 198, 199, 200, 201, 202, 203, 204, 205, 206, 207, 208, 209, 210, 211, 212, 213, 214, 215, 216, 217, 218, 219, 220, 221, 222, 223, 224, 225, 226, 227, 228, 229, 230, 231, 232, 233, 234, 235, 236, 237, 238, 239, 240, 241, 242, 243, 244, 245, 246, 247, 248, 249, 250, 251, 252, 253, 254, 255, 256, 257, 258, 259, 260, 261, 262, 263, 264, 265, 266, 267, 268, 269, 270, 271, 272, 273, 274, 275, 276, 277, 278, 279, 280, 281, 282, 283, 284, 285, 286, 287, 288, 289, 290, 291, 292, 293, 294, 295, 296, 297, 298, 299, 300, 301, 312, or 313, a variant, derivative, orthologue, paralogue or homologue thereof, in which:

[1050] the amino acid at Mutated site 4 is Gly, and the amino acid at Mutated site 5 is Ile.

[1051] In another preferred embodiment, the mutated PPO comprises a sequence of SEQ ID NO: 1, 2, 3, 4, 5, 6, 7, 8, 9, 10, 11, 12, 13, 14, 15, 16, 17, 18, 19, 20, 21, 22, 23, 24, 25, 26, 27, 28, 29, 30, 31, 32, 33, 34, 35, 36, 37, 38, 39, 40, 41, 42, 43, 44, 45, 46, 47, 48, 49, 50, 51, 52, 53, 54, 55, 56, 57, 58, 59, 60, 61, 62, 63, 64, 65, 66, 67, 68, 69, 70, 71, 72, 73, 74, 75, 76, 77, 78, 79, 80, 81, 82, 83, 84, 85, 86, 87, 88, 89, 90, 91, 92, 93, 94, 95, 96, 97, 98, 99, 100, 101, 102, 103, 104, 105, 106, 107, 108, 109, 110, 111, 112, 113, 114, 115, 116, 117, 118, 119, 120, 121, 122, 123, 124, 125, 126, 127, 128, 129, 130, 131, 132, 133, 134, 135, 136, 137, 138, 139, 140, 141, 142, 143, 144, 145, 146, 147, 148, 149, 150, 151, 152, 153, 154, 155, 156, 157, 158, 159, 160, 161, 162, 163, 164, 165, 166, 167, 168, 169, 170, 171, 172, 173, 174, 175, 176, 177, 178, 179, 180, 181, 182, 183, 184, 185, 186, 187, 188, 189, 190, 191, 192, 193, 194, 195, 196, 197, 198, 199, 200, 201, 202, 203, 204, 205, 206, 207, 208, 209, 210, 211, 212, 213, 214, 215, 216, 217, 218, 219, 220, 221, 222, 223, 224, 225, 226, 227, 228, 229, 230, 231, 232, 233, 234, 235, 236, 237, 238, 239, 240, 241, 242, 243, 244, 245, 246, 247, 248, 249, 250, 251, 252, 253, 254, 255, 256, 257, 258, 259, 260, 261, 262, 263, 264, 265, 266, 267, 268, 269, 270, 271, 272, 273, 274, 275, 276, 277, 278, 279, 280, 281, 282, 283, 284, 285, 286, 287, 288, 289, 290, 291, 292, 293, 294, 295, 296, 297, 298, 299, 300, 301, 312, or 313, a variant, derivative, orthologue, paralogue or homologue thereof, in which:

[1052] the amino acid at Mutated site 4 is Gly, and the amino acid at Mutated site 5 is Met.

[1053] In another preferred embodiment, the mutated PPO comprises a sequence of SEQ ID NO: 1, 2, 3, 4, 5, 6, 7, 8, 9, 10, 11, 12, 13, 14, 15, 16, 17, 18, 19, 20, 21, 22, 23, 24, 25, 26, 27, 28, 29, 30, 31, 32, 33, 34, 35, 36, 37, 38, 39, 40, 41, 42, 43, 44, 45, 46, 47, 48, 49, 50, 51, 52, 53, 54, 55, 56, 57, 58, 59, 60, 61, 62, 63, 64, 65, 66, 67, 68, 69, 70, 71, 72, 73, 74, 75, 76, 77, 78, 79, 80, 81, 82, 83, 84, 85, 86, 87, 88, 89, 90, 91, 92, 93, 94, 95, 96, 97, 98, 99, 100, 101, 102, 103, 104, 105, 106, 107, 108, 109, 110, 111, 112, 113, 114, 115, 116, 117, 118, 119, 120, 121, 122, 123, 124, 125, 126, 127, 128, 129, 130, 131, 132, 133, 134, 135, 136, 137, 138, 139, 140, 141, 142, 143, 144, 145, 146, 147, 148, 149, 150, 151, 152, 153, 154, 155, 156, 157, 158, 159, 160, 161, 162, 163, 164, 165, 166, 167, 168, 169, 170, 171, 172, 173, 174, 175, 176, 177, 178, 179, 180, 181, 182, 183, 184, 185, 186, 187, 188, 189, 190, 191, 192, 193, 194, 195, 196, 197, 198, 199, 200, 201, 202, 203, 204, 205, 206, 207, 208, 209, 210, 211, 212, 213, 214, 215, 216, 217, 218, 219, 220, 221, 222, 223, 224, 225, 226, 227, 228, 229, 230, 231, 232, 233, 234, 235, 236, 237, 238, 239, 240, 241, 242, 243, 244, 245, 246, 247, 248, 249, 250, 251, 252, 253, 254, 255, 256, 257, 258, 259, 260, 261, 262, 263, 264, 265, 266, 267, 268, 269, 270, 271, 272, 273, 274, 275, 276, 277, 278, 279, 280, 281, 282, 283, 284, 285, 286, 287, 288, 289, 290, 291, 292, 293, 294, 295, 296, 297, 298, 299, 300, 301, 312, or 313, a variant, derivative, orthologue, paralogue or homologue thereof, in which:

[1054] the amino acid at Mutated site 4 is Gly, and the amino acid at Mutated site 5 is His.

[1055] In another preferred embodiment, the mutated PPO comprises a sequence of SEQ ID NO: 1, 2, 3, 4, 5, 6, 7, 8, 9, 10, 11, 12, 13, 14, 15, 16, 17, 18, 19, 20, 21, 22, 23, 24, 25, 26, 27, 28, 29, 30, 31, 32, 33, 34, 35, 36, 37, 38, 39, 40, 41, 42, 43, 44, 45, 46, 47, 48, 49, 50, 51, 52, 53, 54, 55, 56, 57, 58, 59, 60, 61, 62, 63, 64, 65, 66, 67, 68, 69, 70, 71, 72, 73, 74, 75, 76, 77, 78, 79, 80, 81, 82, 83, 84, 85, 86, 87, 88, 89, 90, 91, 92, 93, 94, 95, 96, 97, 98, 99, 100, 101, 102, 103, 104, 105, 106, 107, 108, 109, 110, 111, 112, 113, 114, 115, 116, 117, 118, 119, 120, 121, 122, 123, 124, 125, 126, 127, 128, 129, 130, 131, 132, 133, 134, 135, 136, 137, 138, 139, 140, 141, 142, 143, 144, 145, 146, 147, 148, 149, 150, 151, 152, 153, 154, 155, 156, 157, 158, 159, 160, 161, 162, 163, 164, 165, 166, 167, 168, 169, 170, 171, 172, 173, 174, 175, 176, 177, 178, 179, 180, 181, 182, 183, 184, 185, 186, 187, 188, 189, 190, 191, 192, 193, 194, 195, 196, 197, 198, 199, 200, 201, 202, 203, 204, 205, 206, 207, 208, 209, 210, 211, 212, 213, 214, 215, 216, 217, 218, 219, 220, 221, 222, 223, 224, 225, 226, 227, 228, 229, 230, 231, 232, 233, 234, 235, 236, 237, 238, 239, 240, 241, 242, 243, 244, 245, 246, 247, 248, 249, 250, 251, 252, 253, 254, 255, 256, 257, 258, 259, 260, 261, 262, 263, 264, 265, 266, 267, 268, 269, 270, 271, 272, 273, 274, 275, 276, 277, 278, 279, 280, 281, 282, 283, 284, 285, 286, 287, 288, 289, 290, 291, 292, 293, 294, 295, 296, 297, 298, 299, 300, 301, 312, or 313, a variant, derivative, orthologue, paralogue or homologue thereof, in which:

[1056] the amino acid at Mutated site 4 is Gly, and the amino acid at Mutated site 5 is Lys.

[1057] In another preferred embodiment, the mutated PPO comprises a sequence of SEQ ID NO: 1, 2, 3, 4, 5, 6, 7, 8, 9, 10, 11, 12, 13, 14, 15, 16, 17, 18, 19, 20, 21, 22, 23, 24, 25, 26, 27, 28, 29, 30, 31, 32, 33, 34, 35, 36, 37, 38, 39, 40, 41, 42, 43, 44, 45, 46, 47, 48, 49, 50, 51, 52, 53, 54, 55, 56, 57, 58, 59, 60, 61, 62, 63, 64, 65, 66, 67, 68, 69, 70, 71, 72, 73, 74, 75, 76, 77, 78, 79, 80, 81, 82, 83, 84, 85, 86, 87, 88, 89, 90, 91, 92, 93, 94, 95, 96, 97, 98, 99, 100, 101, 102, 103, 104, 105, 106, 107, 108, 109, 110, 111, 112, 113, 114, 115, 116, 117, 118, 119, 120, 121, 122, 123, 124, 125, 126, 127, 128, 129, 130, 131, 132, 133, 134, 135, 136, 137, 138, 139, 140, 141, 142, 143, 144, 145, 146, 147, 148, 149, 150, 151, 152, 153, 154, 155, 156, 157, 158, 159, 160, 161, 162, 163, 164, 165, 166, 167, 168, 169, 170, 171, 172, 173, 174, 175, 176, 177, 178, 179, 180, 181, 182, 183, 184, 185, 186, 187, 188, 189, 190, 191, 192, 193, 194, 195, 196, 197, 198, 199, 200, 201, 202, 203, 204, 205, 206, 207, 208, 209, 210, 211, 212, 213, 214, 215, 216, 217, 218, 219, 220, 221, 222, 223, 224, 225, 226, 227, 228, 229, 230, 231, 232, 233, 234, 235, 236, 237, 238, 239, 240, 241, 242, 243, 244, 245, 246, 247, 248, 249, 250, 251, 252, 253, 254, 255, 256, 257, 258, 259, 260, 261, 262, 263, 264, 265, 266, 267, 268, 269, 270, 271, 272, 273, 274, 275, 276, 277, 278, 279, 280, 281, 282, 283, 284, 285, 286, 287, 288, 289, 290, 291, 292, 293, 294, 295, 296, 297, 298, 299, 300, 301, 312, or 313, a variant, derivative, orthologue, paralogue or homologue thereof, in which:

[1058] the amino acid at Mutated site 4 is Gly, and the amino acid at Mutated site 5 is Asp.

[1059] In another preferred embodiment, the mutated PPO comprises a sequence of SEQ ID NO: 1, 2, 3, 4, 5, 6, 7, 8, 9, 10, 11, 12, 13, 14, 15, 16, 17, 18, 19, 20, 21, 22, 23, 24, 25, 26, 27, 28, 29, 30, 31, 32, 33, 34, 35, 36, 37, 38, 39, 40, 41, 42, 43, 44, 45, 46, 47, 48, 49, 50, 51, 52, 53, 54, 55, 56, 57, 58, 59, 60, 61, 62, 63, 64, 65, 66, 67, 68, 69, 70, 71, 72, 73, 74, 75, 76, 77, 78, 79, 80, 81, 82, 83, 84, 85, 86, 87, 88, 89, 90, 91, 92, 93, 94, 95, 96, 97, 98, 99, 100, 101, 102, 103, 104, 105, 106, 107, 108, 109, 110, 111, 112, 113, 114, 115, 116, 117, 118, 119, 120, 121, 122, 123, 124, 125, 126, 127, 128, 129, 130, 131, 132, 133, 134, 135, 136, 137, 138, 139, 140, 141, 142, 143, 144, 145, 146, 147, 148, 149, 150, 151, 152, 153, 154, 155, 156, 157, 158, 159, 160, 161, 162, 163, 164, 165, 166, 167, 168, 169, 170, 171, 172, 173, 174, 175, 176, 177, 178, 179, 180, 181, 182, 183, 184, 185, 186, 187, 188, 189, 190, 191, 192, 193, 194, 195, 196, 197, 198, 199, 200, 201, 202, 203, 204, 205, 206, 207, 208, 209, 210, 211, 212, 213, 214, 215, 216, 217, 218, 219, 220, 221, 222, 223, 224, 225, 226, 227, 228, 229, 230, 231, 232, 233, 234, 235, 236, 237, 238, 239, 240, 241, 242, 243, 244, 245, 246, 247, 248, 249, 250, 251, 252, 253, 254, 255, 256, 257, 258, 259, 260, 261, 262, 263, 264, 265, 266, 267, 268, 269, 270, 271, 272, 273, 274, 275, 276, 277, 278, 279, 280, 281, 282, 283, 284, 285, 286, 287, 288, 289, 290, 291, 292, 293, 294, 295, 296, 297, 298, 299, 300, 301, 312, or 313, a variant, derivative, orthologue, paralogue or homologue thereof, in which:

[1060] the amino acid at Mutated site 4 is Gly, and the amino acid at Mutated site 5 is Glu.

[1061] In another preferred embodiment, the mutated PPO comprises a sequence of SEQ ID NO: 1, 2, 3, 4, 5, 6, 7, 8, 9, 10, 11, 12, 13, 14, 15, 16, 17, 18, 19, 20, 21, 22, 23, 24, 25, 26, 27, 28, 29, 30, 31, 32, 33, 34, 35, 36, 37, 38, 39, 40, 41, 42, 43, 44, 45, 46, 47, 48, 49, 50, 51, 52, 53, 54, 55, 56, 57, 58, 59, 60, 61, 62, 63, 64, 65, 66, 67, 68, 69, 70, 71, 72, 73, 74, 75, 76, 77, 78, 79, 80, 81, 82, 83, 84, 85, 86, 87, 88, 89, 90, 91, 92, 93, 94, 95, 96, 97, 98, 99, 100, 101, 102, 103, 104, 105, 106, 107, 108, 109, 110, 111, 112, 113, 114, 115, 116, 117, 118, 119, 120, 121, 122, 123, 124, 125, 126, 127, 128, 129, 130, 131, 132, 133, 134, 135, 136, 137, 138, 139, 140, 141, 142, 143, 144, 145, 146, 147, 148, 149, 150, 151, 152, 153, 154, 155, 156, 157, 158, 159, 160, 161, 162, 163, 164, 165, 166, 167, 168, 169, 170, 171, 172, 173, 174, 175, 176, 177, 178, 179, 180, 181, 182, 183, 184, 185, 186, 187, 188, 189, 190, 191, 192, 193, 194, 195, 196, 197, 198, 199, 200, 201, 202, 203, 204, 205, 206, 207, 208, 209, 210, 211, 212, 213, 214, 215, 216, 217, 218, 219, 220, 221, 222, 223, 224, 225, 226, 227, 228, 229, 230, 231, 232, 233, 234, 235, 236, 237, 238, 239, 240, 241, 242, 243, 244, 245, 246, 247, 248, 249, 250, 251, 252, 253, 254, 255, 256, 257, 258, 259, 260, 261, 262, 263, 264, 265, 266, 267, 268, 269, 270, 271, 272, 273, 274, 275, 276, 277, 278, 279, 280, 281, 282, 283, 284, 285, 286, 287, 288, 289, 290, 291, 292, 293, 294, 295, 296, 297, 298, 299, 300, 301, 312, or 313, a variant, derivative, orthologue, paralogue or homologue thereof, in which:

[1062] the amino acid at Mutated site 4 is Gly, and the amino acid at Mutated site 5 is Ser.

[1063] In another preferred embodiment, the mutated PPO comprises a sequence of SEQ ID NO: 1, 2, 3, 4, 5, 6, 7, 8, 9, 10, 11, 12, 13, 14, 15, 16, 17, 18, 19, 20, 21, 22, 23, 24, 25, 26, 27, 28, 29, 30, 31, 32, 33, 34, 35, 36, 37, 38, 39, 40, 41, 42, 43, 44, 45, 46, 47, 48, 49, 50, 51, 52, 53, 54, 55, 56, 57, 58, 59, 60, 61, 62, 63, 64, 65, 66, 67, 68, 69, 70, 71, 72, 73, 74, 75, 76, 77, 78, 79, 80, 81, 82, 83, 84, 85, 86, 87, 88, 89, 90, 91, 92, 93, 94, 95, 96, 97, 98, 99, 100, 101, 102, 103, 104, 105, 106, 107, 108, 109, 110, 111, 112, 113, 114, 115, 116, 117, 118, 119, 120, 121, 122, 123, 124, 125, 126, 127, 128, 129, 130, 131, 132, 133, 134, 135, 136, 137, 138, 139, 140, 141, 142, 143, 144, 145, 146, 147, 148, 149, 150, 151, 152, 153, 154, 155, 156, 157, 158, 159, 160, 161, 162, 163, 164, 165, 166, 167, 168, 169, 170, 171, 172, 173, 174, 175, 176, 177, 178, 179, 180, 181, 182, 183, 184, 185, 186, 187, 188, 189, 190, 191, 192, 193, 194, 195, 196, 197, 198, 199, 200, 201, 202, 203, 204, 205, 206, 207, 208, 209, 210, 211, 212, 213, 214, 215, 216, 217, 218, 219, 220, 221, 222, 223, 224, 225, 226, 227, 228, 229, 230, 231, 232, 233, 234, 235, 236, 237, 238, 239, 240, 241, 242, 243, 244, 245, 246, 247, 248, 249, 250, 251, 252, 253, 254, 255, 256, 257, 258, 259, 260, 261, 262, 263, 264, 265, 266, 267, 268, 269, 270, 271, 272, 273, 274, 275, 276, 277, 278, 279, 280, 281, 282, 283, 284, 285, 286, 287, 288, 289, 290, 291, 292, 293, 294, 295, 296, 297, 298, 299, 300, 301, 312, or 313, a variant, derivative, orthologue, paralogue or homologue thereof, in which:

[1064] the amino acid at Mutated site 4 is Gly, and the amino acid at Mutated site 5 is Thr.

[1065] In another preferred embodiment, the mutated PPO comprises a sequence of SEQ ID NO: 1, 2, 3, 4, 5, 6, 7, 8, 9, 10, 11, 12, 13, 14, 15, 16, 17, 18, 19, 20, 21, 22, 23, 24, 25, 26, 27, 28, 29, 30, 31, 32, 33, 34, 35, 36, 37, 38, 39, 40, 41, 42, 43, 44, 45, 46, 47, 48, 49, 50, 51, 52, 53, 54, 55, 56, 57, 58, 59, 60, 61, 62, 63, 64, 65, 66, 67, 68, 69, 70, 71, 72, 73, 74, 75, 76, 77, 78, 79, 80, 81, 82, 83, 84, 85, 86, 87, 88, 89, 90, 91, 92, 93, 94, 95, 96, 97, 98, 99, 100, 101, 102, 103, 104, 105, 106, 107, 108, 109, 110, 111, 112, 113, 114, 115, 116, 117, 118, 119, 120, 121, 122, 123, 124, 125, 126, 127, 128, 129, 130, 131, 132, 133, 134, 135, 136, 137, 138, 139, 140, 141, 142, 143, 144, 145, 146, 147, 148, 149, 150, 151, 152, 153, 154, 155, 156, 157, 158, 159, 160, 161, 162, 163, 164, 165, 166, 167, 168, 169, 170, 171, 172, 173, 174, 175, 176, 177, 178, 179, 180, 181, 182, 183, 184, 185, 186, 187, 188, 189, 190, 191, 192, 193, 194, 195, 196, 197, 198, 199, 200, 201, 202, 203, 204, 205, 206, 207, 208, 209, 210, 211, 212, 213, 214, 215, 216, 217, 218, 219, 220, 221, 222, 223, 224, 225, 226, 227, 228, 229, 230, 231, 232, 233, 234, 235, 236, 237, 238, 239, 240, 241, 242, 243, 244, 245, 246, 247, 248, 249, 250, 251, 252, 253, 254, 255, 256, 257, 258, 259, 260, 261, 262, 263, 264, 265, 266, 267, 268, 269, 270, 271, 272, 273, 274, 275, 276, 277, 278, 279, 280, 281, 282, 283, 284, 285, 286, 287, 288, 289, 290, 291, 292, 293, 294, 295, 296, 297, 298, 299, 300, 301, 312, or 313, a variant, derivative, orthologue, paralogue or homologue thereof, in which:

[1066] the amino acid at Mutated site 4 is Gly, and the amino acid at Mutated site 5 is Asn.

[1067] In another preferred embodiment, the mutated PPO comprises a sequence of SEQ ID NO: 1, 2, 3, 4, 5, 6, 7, 8, 9, 10, 11, 12, 13, 14, 15, 16, 17, 18, 19, 20, 21, 22, 23, 24, 25, 26, 27, 28, 29, 30, 31, 32, 33, 34, 35, 36, 37, 38, 39, 40, 41, 42, 43, 44, 45, 46, 47, 48, 49, 50, 51, 52, 53, 54, 55, 56, 57, 58, 59, 60, 61, 62, 63, 64, 65, 66, 67, 68, 69, 70, 71, 72, 73, 74, 75, 76, 77, 78, 79, 80, 81, 82, 83, 84, 85, 86, 87, 88, 89, 90, 91, 92, 93, 94, 95, 96, 97, 98, 99, 100, 101, 102, 103, 104, 105, 106, 107, 108, 109, 110, 111, 112, 113, 114, 115, 116, 117, 118, 119, 120, 121, 122, 123, 124, 125, 126, 127, 128, 129, 130, 131, 132, 133, 134, 135, 136, 137, 138, 139, 140, 141, 142, 143, 144, 145, 146, 147, 148, 149, 150, 151, 152, 153, 154, 155, 156, 157, 158, 159, 160, 161, 162, 163, 164, 165, 166, 167, 168, 169, 170, 171, 172, 173, 174, 175, 176, 177, 178, 179, 180, 181, 182, 183, 184, 185, 186, 187, 188, 189, 190, 191, 192, 193, 194, 195, 196, 197, 198, 199, 200, 201, 202, 203, 204, 205, 206, 207, 208, 209, 210, 211, 212, 213, 214, 215, 216, 217, 218, 219, 220, 221, 222, 223, 224, 225, 226, 227, 228, 229, 230, 231, 232, 233, 234, 235, 236, 237, 238, 239, 240, 241, 242, 243, 244, 245, 246, 247, 248, 249, 250, 251, 252, 253, 254, 255, 256, 257, 258, 259, 260, 261, 262, 263, 264, 265, 266, 267, 268, 269, 270, 271, 272, 273, 274, 275, 276, 277, 278, 279, 280, 281, 282, 283, 284, 285, 286, 287, 288, 289, 290, 291, 292, 293, 294, 295, 296, 297, 298, 299, 300, 301, 312, or 313, a variant, derivative, orthologue, paralogue or homologue thereof, in which:

[1068] the amino acid at Mutated site 4 is Gly, and the amino acid at Mutated site 5 is Gln.

[1069] In another preferred embodiment, the mutated PPO comprises a sequence of SEQ ID NO: 1, 2, 3, 4, 5, 6, 7, 8, 9, 10, 11, 12, 13, 14, 15, 16, 17, 18, 19, 20, 21, 22, 23, 24, 25, 26, 27, 28, 29, 30, 31, 32, 33, 34, 35, 36, 37, 38, 39, 40, 41, 42, 43, 44, 45, 46, 47, 48, 49, 50, 51, 52, 53, 54, 55, 56, 57, 58, 59, 60, 61, 62, 63, 64, 65, 66, 67, 68, 69, 70, 71, 72, 73, 74, 75, 76, 77, 78, 79, 80, 81, 82, 83, 84, 85, 86, 87, 88, 89, 90, 91, 92, 93, 94, 95, 96, 97, 98, 99, 100, 101, 102, 103, 104, 105, 106, 107, 108, 109, 110, 111, 112, 113, 114, 115, 116, 117, 118, 119, 120, 121, 122, 123, 124, 125, 126, 127, 128, 129, 130, 131, 132, 133, 134, 135, 136, 137, 138, 139, 140, 141, 142, 143, 144, 145, 146, 147, 148, 149, 150, 151, 152, 153, 154, 155, 156, 157, 158, 159, 160, 161, 162, 163, 164, 165, 166, 167, 168, 169, 170, 171, 172, 173, 174, 175, 176, 177, 178, 179, 180, 181, 182, 183, 184, 185, 186, 187, 188, 189, 190, 191, 192, 193, 194, 195, 196, 197, 198, 199, 200, 201, 202, 203, 204, 205, 206, 207, 208, 209, 210, 211, 212, 213, 214, 215, 216, 217, 218, 219, 220, 221, 222, 223, 224, 225, 226, 227, 228, 229, 230, 231, 232, 233, 234, 235, 236, 237, 238, 239, 240, 241, 242, 243, 244, 245, 246, 247, 248, 249, 250, 251, 252, 253, 254, 255, 256, 257, 258, 259, 260, 261, 262, 263, 264, 265, 266, 267, 268, 269, 270, 271, 272, 273, 274, 275, 276, 277, 278, 279, 280, 281, 282, 283, 284, 285, 286, 287, 288, 289, 290, 291, 292, 293, 294, 295, 296, 297, 298, 299, 300, 301, 312, or 313, a variant, derivative, orthologue, paralogue or homologue thereof, in which:

[1070] the amino acid at Mutated site 4 is Gly, and the amino acid at Mutated site 5 is Cys.

[1071] In another preferred embodiment, the mutated PPO comprises a sequence of SEQ ID NO: 1, 2, 3, 4, 5, 6, 7, 8, 9, 10, 11, 12, 13, 14, 15, 16, 17, 18, 19, 20, 21, 22, 23, 24, 25, 26, 27, 28, 29, 30, 31, 32, 33, 34, 35, 36, 37, 38, 39, 40, 41, 42, 43, 44, 45, 46, 47, 48, 49, 50, 51, 52, 53, 54, 55, 56, 57, 58, 59, 60, 61, 62, 63, 64, 65, 66, 67, 68, 69, 70, 71, 72, 73, 74, 75, 76, 77, 78, 79, 80, 81, 82, 83, 84, 85, 86, 87, 88, 89, 90, 91, 92, 93, 94, 95, 96, 97, 98, 99, 100, 101, 102, 103, 104, 105, 106, 107, 108, 109, 110, 111, 112, 113, 114, 115, 116, 117, 118, 119, 120, 121, 122, 123, 124, 125, 126, 127, 128, 129, 130, 131, 132, 133, 134, 135, 136, 137, 138, 139, 140, 141, 142, 143, 144, 145, 146, 147, 148, 149, 150, 151, 152, 153, 154, 155, 156, 157, 158, 159, 160, 161, 162, 163, 164, 165, 166, 167, 168, 169, 170, 171, 172, 173, 174, 175, 176, 177, 178, 179, 180, 181, 182, 183, 184, 185, 186, 187, 188, 189, 190, 191, 192, 193, 194, 195, 196, 197, 198, 199, 200, 201, 202, 203, 204, 205, 206, 207, 208, 209, 210, 211, 212, 213, 214, 215, 216, 217, 218, 219, 220, 221, 222, 223, 224, 225, 226, 227, 228, 229, 230, 231, 232, 233, 234, 235, 236, 237, 238, 239, 240, 241, 242, 243, 244, 245, 246, 247, 248, 249, 250, 251, 252, 253, 254, 255, 256, 257, 258, 259, 260, 261, 262, 263, 264, 265, 266, 267, 268, 269, 270, 271, 272, 273, 274, 275, 276, 277, 278, 279, 280, 281, 282, 283, 284, 285, 286, 287, 288, 289, 290, 291, 292, 293, 294, 295, 296, 297, 298, 299, 300, 301, 312, or 313, a variant, derivative, orthologue, paralogue or homologue thereof, in which:

[1072] the amino acid at Mutated site 4 is Gly, and the amino acid at Mutated site 5 is Gly.

[1073] In another preferred embodiment, the mutated PPO comprises a sequence of SEQ ID NO: 1, 2, 3, 4, 5, 6, 7, 8, 9, 10, 11, 12, 13, 14, 15, 16, 17, 18, 19, 20, 21, 22, 23, 24, 25, 26, 27, 28, 29, 30, 31, 32, 33, 34, 35, 36, 37, 38, 39, 40, 41, 42, 43, 44, 45, 46, 47, 48, 49, 50, 51, 52, 53, 54, 55, 56, 57, 58, 59, 60, 61, 62, 63, 64, 65, 66, 67, 68, 69, 70, 71, 72, 73, 74, 75, 76, 77, 78, 79, 80, 81, 82, 83, 84, 85, 86, 87, 88, 89, 90, 91, 92, 93, 94, 95, 96, 97, 98, 99, 100, 101, 102, 103, 104, 105, 106, 107, 108, 109, 110, 111, 112, 113, 114, 115, 116, 117, 118, 119, 120, 121, 122, 123, 124, 125, 126, 127, 128, 129, 130, 131, 132, 133, 134, 135, 136, 137, 138, 139, 140, 141, 142, 143, 144, 145, 146, 147, 148, 149, 150, 151, 152, 153, 154, 155, 156, 157, 158, 159, 160, 161, 162, 163, 164, 165, 166, 167, 168, 169, 170, 171, 172, 173, 174, 175, 176, 177, 178, 179, 180, 181, 182, 183, 184, 185, 186, 187, 188, 189, 190, 191, 192, 193, 194, 195, 196, 197, 198, 199, 200, 201, 202, 203, 204, 205, 206, 207, 208, 209, 210, 211, 212, 213, 214, 215, 216, 217, 218, 219, 220, 221, 222, 223, 224, 225, 226, 227, 228, 229, 230, 231, 232, 233, 234, 235, 236, 237, 238, 239, 240, 241, 242, 243, 244, 245, 246, 247, 248, 249, 250, 251, 252, 253, 254, 255, 256, 257, 258, 259, 260, 261, 262, 263, 264, 265, 266, 267, 268, 269, 270, 271, 272, 273, 274, 275, 276, 277, 278, 279, 280, 281, 282, 283, 284, 285, 286, 287, 288, 289, 290, 291, 292, 293, 294, 295, 296, 297, 298, 299, 300, 301, 312, or 313, a variant, derivative, orthologue, paralogue or homologue thereof, in which:

[1074] the amino acid at Mutated site 4 is Gly, and the amino acid at Mutated site 5 is Pro.

[1075] In another preferred embodiment, the mutated PPO comprises a sequence of SEQ ID NO: 1, 2, 3, 4, 5, 6, 7, 8, 9, 10, 11, 12, 13, 14, 15, 16, 17, 18, 19, 20, 21, 22, 23, 24, 25, 26, 27, 28, 29, 30, 31, 32, 33, 34, 35, 36, 37, 38, 39, 40, 41, 42, 43, 44, 45, 46, 47, 48, 49, 50, 51, 52, 53, 54, 55, 56, 57, 58, 59, 60, 61, 62, 63, 64, 65, 66, 67, 68, 69, 70, 71, 72, 73, 74, 75, 76, 77, 78, 79, 80, 81, 82, 83, 84, 85, 86, 87, 88, 89, 90, 91, 92, 93, 94, 95, 96, 97, 98, 99, 100, 101, 102, 103, 104, 105, 106, 107, 108, 109, 110, 111, 112, 113, 114, 115, 116, 117, 118, 119, 120, 121, 122, 123, 124, 125, 126, 127, 128, 129, 130, 131, 132, 133, 134, 135, 136, 137, 138, 139, 140, 141, 142, 143, 144, 145, 146, 147, 148, 149, 150, 151, 152, 153, 154, 155, 156, 157, 158, 159, 160, 161, 162, 163, 164, 165, 166, 167, 168, 169, 170, 171, 172, 173, 174, 175, 176, 177, 178, 179, 180, 181, 182, 183, 184, 185, 186, 187, 188, 189, 190, 191, 192, 193, 194, 195, 196, 197, 198, 199, 200, 201, 202, 203, 204, 205, 206, 207, 208, 209, 210, 211, 212, 213, 214, 215, 216, 217, 218, 219, 220, 221, 222, 223, 224, 225, 226, 227, 228, 229, 230, 231, 232, 233, 234, 235, 236, 237, 238, 239, 240, 241, 242, 243, 244, 245, 246, 247, 248, 249, 250, 251, 252, 253, 254, 255, 256, 257, 258, 259, 260, 261, 262, 263, 264, 265, 266, 267, 268, 269, 270, 271, 272, 273, 274, 275, 276, 277, 278, 279, 280, 281, 282, 283, 284, 285, 286, 287, 288, 289, 290, 291, 292, 293, 294, 295, 296, 297, 298, 299, 300, 301, 312, or 313, a variant, derivative, orthologue, paralogue or homologue thereof, in which:

[1076] the amino acid at Mutated site 4 is Gly, and the amino acid at Mutated site 5 is Arg.

[1077] In another preferred embodiment, the mutated PPO comprises a sequence of SEQ ID NO: 1, 2, 3, 4, 5, 6, 7, 8, 9, 10, 11, 12, 13, 14, 15, 16, 17, 18, 19, 20, 21, 22, 23, 24, 25, 26, 27, 28, 29, 30, 31, 32, 33, 34, 35, 36, 37, 38, 39, 40, 41, 42, 43, 44, 45, 46, 47, 48, 49, 50, 51, 52, 53, 54, 55, 56, 57, 58, 59, 60, 61, 62, 63, 64, 65, 66, 67, 68, 69, 70, 71, 72, 73, 74, 75, 76, 77, 78, 79, 80, 81, 82, 83, 84, 85, 86, 87, 88, 89, 90, 91, 92, 93, 94, 95, 96, 97, 98, 99, 100, 101, 102, 103, 104, 105, 106, 107, 108, 109, 110, 111, 112, 113, 114, 115, 116, 117, 118, 119, 120, 121, 122, 123, 124, 125, 126, 127, 128, 129, 130, 131, 132, 133, 134, 135, 136, 137, 138, 139, 140, 141, 142, 143, 144, 145, 146, 147, 148, 149, 150, 151, 152, 153, 154, 155, 156, 157, 158, 159, 160, 161, 162, 163, 164, 165, 166, 167, 168, 169, 170, 171, 172, 173, 174, 175, 176, 177, 178, 179, 180, 181, 182, 183, 184, 185, 186, 187, 188, 189, 190, 191, 192, 193, 194, 195, 196, 197, 198, 199, 200, 201, 202, 203, 204, 205, 206, 207, 208, 209, 210, 211, 212, 213, 214, 215, 216, 217, 218, 219, 220, 221, 222, 223, 224, 225, 226, 227, 228, 229, 230, 231, 232, 233, 234, 235, 236, 237, 238, 239, 240, 241, 242, 243, 244, 245, 246, 247, 248, 249, 250, 251, 252, 253, 254, 255, 256, 257, 258, 259, 260, 261, 262, 263, 264, 265, 266, 267, 268, 269, 270, 271, 272, 273, 274, 275, 276, 277, 278, 279, 280, 281, 282, 283, 284, 285, 286, 287, 288, 289, 290, 291, 292, 293, 294, 295, 296, 297, 298, 299, 300, 301, 312, or 313, a variant, derivative, orthologue, paralogue or homologue thereof, in which:

[1078] the amino acid at Mutated site 4 is Gly, and the amino acid at Mutated site 5 is Tyr.

[1079] In another preferred embodiment, the mutated PPO comprises a sequence of SEQ ID NO: 1, 2, 3, 4, 5, 6, 7, 8, 9, 10, 11, 12, 13, 14, 15, 16, 17, 18, 19, 20, 21, 22, 23, 24, 25, 26, 27, 28, 29, 30, 31, 32, 33, 34, 35, 36, 37, 38, 39, 40, 41, 42, 43, 44, 45, 46, 47, 48, 49, 50, 51, 52, 53, 54, 55, 56, 57, 58, 59, 60, 61, 62, 63, 64, 65, 66, 67, 68, 69, 70, 71, 72, 73, 74, 75, 76, 77, 78, 79, 80, 81, 82, 83, 84, 85, 86, 87, 88, 89, 90, 91, 92, 93, 94, 95, 96, 97, 98, 99, 100, 101, 102, 103, 104, 105, 106, 107, 108, 109, 110, 111, 112, 113, 114, 115, 116, 117, 118, 119, 120, 121, 122, 123, 124, 125, 126, 127, 128, 129, 130, 131, 132, 133, 134, 135, 136, 137, 138, 139, 140, 141, 142, 143, 144, 145, 146, 147, 148, 149, 150, 151, 152, 153, 154, 155, 156, 157, 158, 159, 160, 161, 162, 163, 164, 165, 166, 167, 168, 169, 170, 171, 172, 173, 174, 175, 176, 177, 178, 179, 180, 181, 182, 183, 184, 185, 186, 187, 188, 189, 190, 191, 192, 193, 194, 195, 196, 197, 198, 199, 200, 201, 202, 203, 204, 205, 206, 207, 208, 209, 210, 211, 212, 213, 214, 215, 216, 217, 218, 219, 220, 221, 222, 223, 224, 225, 226, 227, 228, 229, 230, 231, 232, 233, 234, 235, 236, 237, 238, 239, 240, 241, 242, 243, 244, 245, 246, 247, 248, 249, 250, 251, 252, 253, 254, 255, 256, 257, 258, 259, 260, 261, 262, 263, 264, 265, 266, 267, 268, 269, 270, 271, 272, 273, 274, 275, 276, 277, 278, 279, 280, 281, 282, 283, 284, 285, 286, 287, 288, 289, 290, 291, 292, 293, 294, 295, 296, 297, 298, 299, 300, 301, 312, or 313, a variant, derivative, orthologue, paralogue or homologue thereof, in which:

[1080] the amino acid at Mutated site 4 is Gly, and the amino acid at Mutated site 5 is Trp.

[1081] In another preferred embodiment, the mutated PPO comprises a sequence of SEQ ID NO: 1, 2, 3, 4, 5, 6, 7, 8, 9, 10, 11, 12, 13, 14, 15, 16, 17, 18, 19, 20, 21, 22, 23, 24, 25, 26, 27, 28, 29, 30, 31, 32, 33, 34, 35, 36, 37, 38, 39, 40, 41, 42, 43, 44, 45, 46, 47, 48, 49, 50, 51, 52, 53, 54, 55, 56, 57, 58, 59, 60, 61, 62, 63, 64, 65, 66, 67, 68, 69, 70, 71, 72, 73, 74, 75, 76, 77, 78, 79, 80, 81, 82, 83, 84, 85, 86, 87, 88, 89, 90, 91, 92, 93, 94, 95, 96, 97, 98, 99, 100, 101, 102, 103, 104, 105, 106, 107, 108, 109, 110, 111, 112, 113, 114, 115, 116, 117, 118, 119, 120, 121, 122, 123, 124, 125, 126, 127, 128, 129, 130, 131, 132, 133, 134, 135, 136, 137, 138, 139, 140, 141, 142, 143, 144, 145, 146, 147, 148, 149, 150, 151, 152, 153, 154, 155, 156, 157, 158, 159, 160, 161, 162, 163, 164, 165, 166, 167, 168, 169, 170, 171, 172, 173, 174, 175, 176, 177, 178, 179, 180, 181, 182, 183, 184, 185, 186, 187, 188, 189, 190, 191, 192, 193, 194, 195, 196, 197, 198, 199, 200, 201, 202, 203, 204, 205, 206, 207, 208, 209, 210, 211, 212, 213, 214, 215, 216, 217, 218, 219, 220, 221, 222, 223, 224, 225, 226, 227, 228, 229, 230, 231, 232, 233, 234, 235, 236, 237, 238, 239, 240, 241, 242, 243, 244, 245, 246, 247, 248, 249, 250, 251, 252, 253, 254, 255, 256, 257, 258, 259, 260, 261, 262, 263, 264, 265, 266, 267, 268, 269, 270, 271, 272, 273, 274, 275, 276, 277, 278, 279, 280, 281, 282, 283, 284, 285, 286, 287, 288, 289, 290, 291, 292, 293, 294, 295, 296, 297, 298, 299, 300, 301, 312, or 313, a variant, derivative, orthologue, paralogue or homologue thereof, in which:

[1082] the amino acid at Mutated site 4 is Pro, and the amino acid at Mutated site 5 is Ala.

[1083] In another preferred embodiment, the mutated PPO comprises a sequence of SEQ ID NO: 1, 2, 3, 4, 5, 6, 7, 8, 9, 10, 11, 12, 13, 14, 15, 16, 17, 18, 19, 20, 21, 22, 23, 24, 25, 26, 27, 28, 29, 30, 31, 32, 33, 34, 35, 36, 37, 38, 39, 40, 41, 42, 43, 44, 45, 46, 47, 48, 49, 50, 51, 52, 53, 54, 55, 56, 57, 58, 59, 60, 61, 62, 63, 64, 65, 66, 67, 68, 69, 70, 71, 72, 73, 74, 75, 76, 77, 78, 79, 80, 81, 82, 83, 84, 85, 86, 87, 88, 89, 90, 91, 92, 93, 94, 95, 96, 97, 98, 99, 100, 101, 102, 103, 104, 105, 106, 107, 108, 109, 110, 111, 112, 113, 114, 115, 116, 117, 118, 119, 120, 121, 122, 123, 124, 125, 126, 127, 128, 129, 130, 131, 132, 133, 134, 135, 136, 137, 138, 139, 140, 141, 142, 143, 144, 145, 146, 147, 148, 149, 150, 151, 152, 153, 154, 155, 156, 157, 158, 159, 160, 161, 162, 163, 164, 165, 166, 167, 168, 169, 170, 171, 172, 173, 174, 175, 176, 177, 178, 179, 180, 181, 182, 183, 184, 185, 186, 187, 188, 189, 190, 191, 192, 193, 194, 195, 196, 197, 198, 199, 200, 201, 202, 203, 204, 205, 206, 207, 208, 209, 210, 211, 212, 213, 214, 215, 216, 217, 218, 219, 220, 221, 222, 223, 224, 225, 226, 227, 228, 229, 230, 231, 232, 233, 234, 235, 236, 237, 238, 239, 240, 241, 242, 243, 244, 245, 246, 247, 248, 249, 250, 251, 252, 253, 254, 255, 256, 257, 258, 259, 260, 261, 262, 263, 264, 265, 266, 267, 268, 269, 270, 271, 272, 273, 274, 275, 276, 277, 278, 279, 280, 281, 282, 283, 284, 285, 286, 287, 288, 289, 290, 291, 292, 293, 294, 295, 296, 297, 298, 299, 300, 301, 312, or 313, a variant, derivative, orthologue, paralogue or homologue thereof, in which:

[1084] the amino acid at Mutated site 4 is Pro, and the amino acid at Mutated site 5 is Leu.

[1085] In another preferred embodiment, the mutated PPO comprises a sequence of SEQ ID NO: 1, 2, 3, 4, 5, 6, 7, 8, 9, 10, 11, 12, 13, 14, 15, 16, 17, 18, 19, 20, 21, 22, 23, 24, 25, 26, 27, 28, 29, 30, 31, 32, 33, 34, 35, 36, 37, 38, 39, 40, 41, 42, 43, 44, 45, 46, 47, 48, 49, 50, 51, 52, 53, 54, 55, 56, 57, 58, 59, 60, 61, 62, 63, 64, 65, 66, 67, 68, 69, 70, 71, 72, 73, 74, 75, 76, 77, 78, 79, 80, 81, 82, 83, 84, 85, 86, 87, 88, 89, 90, 91, 92, 93, 94, 95, 96, 97, 98, 99, 100, 101, 102, 103, 104, 105, 106, 107, 108, 109, 110, 111, 112, 113, 114, 115, 116, 117, 118, 119, 120, 121, 122, 123, 124, 125, 126, 127, 128, 129, 130, 131, 132, 133, 134, 135, 136, 137, 138, 139, 140, 141, 142, 143, 144, 145, 146, 147, 148, 149, 150, 151, 152, 153, 154, 155, 156, 157, 158, 159, 160, 161, 162, 163, 164, 165, 166, 167, 168, 169, 170, 171, 172, 173, 174, 175, 176, 177, 178, 179, 180, 181, 182, 183, 184, 185, 186, 187, 188, 189, 190, 191, 192, 193, 194, 195, 196, 197, 198, 199, 200, 201, 202, 203, 204, 205, 206, 207, 208, 209, 210, 211, 212, 213, 214, 215, 216, 217, 218, 219, 220, 221, 222, 223, 224, 225, 226, 227, 228, 229, 230, 231, 232, 233, 234, 235, 236, 237, 238, 239, 240, 241, 242, 243, 244, 245, 246, 247, 248, 249, 250, 251, 252, 253, 254, 255, 256, 257, 258, 259, 260, 261, 262, 263, 264, 265, 266, 267, 268, 269, 270, 271, 272, 273, 274, 275, 276, 277, 278, 279, 280, 281, 282, 283, 284, 285, 286, 287, 288, 289, 290, 291, 292, 293, 294, 295, 296, 297, 298, 299, 300, 301, 312, or 313, a variant, derivative, orthologue, paralogue or homologue thereof, in which:

[1086] the amino acid at Mutated site 4 is Pro, and the amino acid at Mutated site 5 is Val.

[1087] In another preferred embodiment, the mutated PPO comprises a sequence of SEQ ID NO: 1, 2, 3, 4, 5, 6, 7, 8, 9, 10, 11, 12, 13, 14, 15, 16, 17, 18, 19, 20, 21, 22, 23, 24, 25, 26, 27, 28, 29, 30, 31, 32, 33, 34, 35, 36, 37, 38, 39, 40, 41, 42, 43, 44, 45, 46, 47, 48, 49, 50, 51, 52, 53, 54, 55, 56, 57, 58, 59, 60, 61, 62, 63, 64, 65, 66, 67, 68, 69, 70, 71, 72, 73, 74, 75, 76, 77, 78, 79, 80, 81, 82, 83, 84, 85, 86, 87, 88, 89, 90, 91, 92, 93, 94, 95, 96, 97, 98, 99, 100, 101, 102, 103, 104, 105, 106, 107, 108, 109, 110, 111, 112, 113, 114, 115, 116, 117, 118, 119, 120, 121, 122, 123, 124, 125, 126, 127, 128, 129, 130, 131, 132, 133, 134, 135, 136, 137, 138, 139, 140, 141, 142, 143, 144, 145, 146, 147, 148, 149, 150, 151, 152, 153, 154, 155, 156, 157, 158, 159, 160, 161, 162, 163, 164, 165, 166, 167, 168, 169, 170, 171, 172, 173, 174, 175, 176, 177, 178, 179, 180, 181, 182, 183, 184, 185, 186, 187, 188, 189, 190, 191, 192, 193, 194, 195, 196, 197, 198, 199, 200, 201, 202, 203, 204, 205, 206, 207, 208, 209, 210, 211, 212, 213, 214, 215, 216, 217, 218, 219, 220, 221, 222, 223, 224, 225, 226, 227, 228, 229, 230, 231, 232, 233, 234, 235, 236, 237, 238, 239, 240, 241, 242, 243, 244, 245, 246, 247, 248, 249, 250, 251, 252, 253, 254, 255, 256, 257, 258, 259, 260, 261, 262, 263, 264, 265, 266, 267, 268, 269, 270, 271, 272, 273, 274, 275, 276, 277, 278, 279, 280, 281, 282, 283, 284, 285, 286, 287, 288, 289, 290, 291, 292, 293, 294, 295, 296, 297, 298, 299, 300, 301, 312, or 313, a variant, derivative, orthologue, paralogue or homologue thereof, in which:

[1088] the amino acid at Mutated site 4 is Pro, and the amino acid at Mutated site 5 is Ile.

[1089] In another preferred embodiment, the mutated PPO comprises a sequence of SEQ ID NO: 1, 2, 3, 4, 5, 6, 7, 8, 9, 10, 11, 12, 13, 14, 15, 16, 17, 18, 19, 20, 21, 22, 23, 24, 25, 26, 27, 28, 29, 30, 31, 32, 33, 34, 35, 36, 37, 38, 39, 40, 41, 42, 43, 44, 45, 46, 47, 48, 49, 50, 51, 52, 53, 54, 55, 56, 57, 58, 59, 60, 61, 62, 63, 64, 65, 66, 67, 68, 69, 70, 71, 72, 73, 74, 75, 76, 77, 78, 79, 80, 81, 82, 83, 84, 85, 86, 87, 88, 89, 90, 91, 92, 93, 94, 95, 96, 97, 98, 99, 100, 101, 102, 103, 104, 105, 106, 107, 108, 109, 110, 111, 112, 113, 114, 115, 116, 117, 118, 119, 120, 121, 122, 123, 124, 125, 126, 127, 128, 129, 130, 131, 132, 133, 134, 135, 136, 137, 138, 139, 140, 141, 142, 143, 144, 145, 146, 147, 148, 149, 150, 151, 152, 153, 154, 155, 156, 157, 158, 159, 160, 161, 162, 163, 164, 165, 166, 167, 168, 169, 170, 171, 172, 173, 174, 175, 176, 177, 178, 179, 180, 181, 182, 183, 184, 185, 186, 187, 188, 189, 190, 191, 192, 193, 194, 195, 196, 197, 198, 199, 200, 201, 202, 203, 204, 205, 206, 207, 208, 209, 210, 211, 212, 213, 214, 215, 216, 217, 218, 219, 220, 221, 222, 223, 224, 225, 226, 227, 228, 229, 230, 231, 232, 233, 234, 235, 236, 237, 238, 239, 240, 241, 242, 243, 244, 245, 246, 247, 248, 249, 250, 251, 252, 253, 254, 255, 256, 257, 258, 259, 260, 261, 262, 263, 264, 265, 266, 267, 268, 269, 270, 271, 272, 273, 274, 275, 276, 277, 278, 279, 280, 281, 282, 283, 284, 285, 286, 287, 288, 289, 290, 291, 292, 293, 294, 295, 296, 297, 298, 299, 300, 301, 312, or 313, a variant, derivative, orthologue, paralogue or homologue thereof, in which:

[1090] the amino acid at Mutated site 4 is Pro, and the amino acid at Mutated site 5 is Met.

[1091] In another preferred embodiment, the mutated PPO comprises a sequence of SEQ ID NO: 1, 2, 3, 4, 5, 6, 7, 8, 9, 10, 11, 12, 13, 14, 15, 16, 17, 18, 19, 20, 21, 22, 23, 24, 25, 26, 27, 28, 29, 30, 31, 32, 33, 34, 35, 36, 37, 38, 39, 40, 41, 42, 43, 44, 45, 46, 47, 48, 49, 50, 51, 52, 53, 54, 55, 56, 57, 58, 59, 60, 61, 62, 63, 64, 65, 66, 67, 68, 69, 70, 71, 72, 73, 74, 75, 76, 77, 78, 79, 80, 81, 82, 83, 84, 85, 86, 87, 88, 89, 90, 91, 92, 93, 94, 95, 96, 97, 98, 99, 100, 101, 102, 103, 104, 105, 106, 107, 108, 109, 110, 111, 112, 113, 114, 115, 116, 117, 118, 119, 120, 121, 122, 123, 124, 125, 126, 127, 128, 129, 130, 131, 132, 133, 134, 135, 136, 137, 138, 139, 140, 141, 142, 143, 144, 145, 146, 147, 148, 149, 150, 151, 152, 153, 154, 155, 156, 157, 158, 159, 160, 161, 162, 163, 164, 165, 166, 167, 168, 169, 170, 171, 172, 173, 174, 175, 176, 177, 178, 179, 180, 181, 182, 183, 184, 185, 186, 187, 188, 189, 190, 191, 192, 193, 194, 195, 196, 197, 198, 199, 200, 201, 202, 203, 204, 205, 206, 207, 208, 209, 210, 211, 212, 213, 214, 215, 216, 217, 218, 219, 220, 221, 222, 223, 224, 225, 226, 227, 228, 229, 230, 231, 232, 233, 234, 235, 236, 237, 238, 239, 240, 241, 242, 243, 244, 245, 246, 247, 248, 249, 250, 251, 252, 253, 254, 255, 256, 257, 258, 259, 260, 261, 262, 263, 264, 265, 266, 267, 268, 269, 270, 271, 272, 273, 274, 275, 276, 277, 278, 279, 280, 281, 282, 283, 284, 285, 286, 287, 288, 289, 290, 291, 292, 293, 294, 295, 296, 297, 298, 299, 300, 301, 312, or 313, a variant, derivative, orthologue, paralogue or homologue thereof, in which:

[1092] the amino acid at Mutated site 4 is Pro, and the amino acid at Mutated site 5 is His.

[1093] In another preferred embodiment, the mutated PPO comprises a sequence of SEQ ID NO: 1, 2, 3, 4, 5, 6, 7, 8, 9, 10, 11, 12, 13, 14, 15, 16, 17, 18, 19, 20, 21, 22, 23, 24, 25, 26, 27, 28, 29, 30, 31, 32, 33, 34, 35, 36, 37, 38, 39, 40, 41, 42, 43, 44, 45, 46, 47, 48, 49, 50, 51, 52, 53, 54, 55, 56, 57, 58, 59, 60, 61, 62, 63, 64, 65, 66, 67, 68, 69, 70, 71, 72, 73, 74, 75, 76, 77, 78, 79, 80, 81, 82, 83, 84, 85, 86, 87, 88, 89, 90, 91, 92, 93, 94, 95, 96, 97, 98, 99, 100, 101, 102, 103, 104, 105, 106, 107, 108, 109, 110, 111, 112, 113, 114, 115, 116, 117, 118, 119, 120, 121, 122, 123, 124, 125, 126, 127, 128, 129, 130, 131, 132, 133, 134, 135, 136, 137, 138, 139, 140, 141, 142, 143, 144, 145, 146, 147, 148, 149, 150, 151, 152, 153, 154, 155, 156, 157, 158, 159, 160, 161, 162, 163, 164, 165, 166, 167, 168, 169, 170, 171, 172, 173, 174, 175, 176, 177, 178, 179, 180, 181, 182, 183, 184, 185, 186, 187, 188, 189, 190, 191, 192, 193, 194, 195, 196, 197, 198, 199, 200, 201, 202, 203, 204, 205, 206, 207, 208, 209, 210, 211, 212, 213, 214, 215, 216, 217, 218, 219, 220, 221, 222, 223, 224, 225, 226, 227, 228, 229, 230, 231, 232, 233, 234, 235, 236, 237, 238, 239, 240, 241, 242, 243, 244, 245, 246, 247, 248, 249, 250, 251, 252, 253, 254, 255, 256, 257, 258, 259, 260, 261, 262, 263, 264, 265, 266, 267, 268, 269, 270, 271, 272, 273, 274, 275, 276, 277, 278, 279, 280, 281, 282, 283, 284, 285, 286, 287, 288, 289, 290, 291, 292, 293, 294, 295, 296, 297, 298, 299, 300, 301, 312, or 313, a variant, derivative, orthologue, paralogue or homologue thereof, in which:

[1094] the amino acid at Mutated site 4 is Pro, and the amino acid at Mutated site 5 is Lys.

[1095] In another preferred embodiment, the mutated PPO comprises a sequence of SEQ ID NO: 1, 2, 3, 4, 5, 6, 7, 8, 9, 10, 11, 12, 13, 14, 15, 16, 17, 18, 19, 20, 21, 22, 23, 24, 25, 26, 27, 28, 29, 30, 31, 32, 33, 34, 35, 36, 37, 38, 39, 40, 41, 42, 43, 44, 45, 46, 47, 48, 49, 50, 51, 52, 53, 54, 55, 56, 57, 58, 59, 60, 61, 62, 63, 64, 65, 66, 67, 68, 69, 70, 71, 72, 73, 74, 75, 76, 77, 78, 79, 80, 81, 82, 83, 84, 85, 86, 87, 88, 89, 90, 91, 92, 93, 94, 95, 96, 97, 98, 99, 100, 101, 102, 103, 104, 105, 106, 107, 108, 109, 110, 111, 112, 113, 114, 115, 116, 117, 118, 119, 120, 121, 122, 123, 124, 125, 126, 127, 128, 129, 130, 131, 132, 133, 134, 135, 136, 137, 138, 139, 140, 141, 142, 143, 144, 145, 146, 147, 148, 149, 150, 151, 152, 153, 154, 155, 156, 157, 158, 159, 160, 161, 162, 163, 164, 165, 166, 167, 168, 169, 170, 171, 172, 173, 174, 175, 176, 177, 178, 179, 180, 181, 182, 183, 184, 185, 186, 187, 188, 189, 190, 191, 192, 193, 194, 195, 196, 197, 198, 199, 200, 201, 202, 203, 204, 205, 206, 207, 208, 209, 210, 211, 212, 213, 214, 215, 216, 217, 218, 219, 220, 221, 222, 223, 224, 225, 226, 227, 228, 229, 230, 231, 232, 233, 234, 235, 236, 237, 238, 239, 240, 241, 242, 243, 244, 245, 246, 247, 248, 249, 250, 251, 252, 253, 254, 255, 256, 257, 258, 259, 260, 261, 262, 263, 264, 265, 266, 267, 268, 269, 270, 271, 272, 273, 274, 275, 276, 277, 278, 279, 280, 281, 282, 283, 284, 285, 286, 287, 288, 289, 290, 291, 292, 293, 294, 295, 296, 297, 298, 299, 300, 301, 312, or 313, a variant, derivative, orthologue, paralogue or homologue thereof, in which:

[1096] the amino acid at Mutated site 4 is Pro, and the amino acid at Mutated site 5 is Asp.

[1097] In another preferred embodiment, the mutated PPO comprises a sequence of SEQ ID NO: 1, 2, 3, 4, 5, 6, 7, 8, 9, 10, 11, 12, 13, 14, 15, 16, 17, 18, 19, 20, 21, 22, 23, 24, 25, 26, 27, 28, 29, 30, 31, 32, 33, 34, 35, 36, 37, 38, 39, 40, 41, 42, 43, 44, 45, 46, 47, 48, 49, 50, 51, 52, 53, 54, 55, 56, 57, 58, 59, 60, 61, 62, 63, 64, 65, 66, 67, 68, 69, 70, 71, 72, 73, 74, 75, 76, 77, 78, 79, 80, 81, 82, 83, 84, 85, 86, 87, 88, 89, 90, 91, 92, 93, 94, 95, 96, 97, 98, 99, 100, 101, 102, 103, 104, 105, 106, 107, 108, 109, 110, 111, 112, 113, 114, 115, 116, 117, 118, 119, 120, 121, 122, 123, 124, 125, 126, 127, 128, 129, 130, 131, 132, 133, 134, 135, 136, 137, 138, 139, 140, 141, 142, 143, 144, 145, 146, 147, 148, 149, 150, 151, 152, 153, 154, 155, 156, 157, 158, 159, 160, 161, 162, 163, 164, 165, 166, 167, 168, 169, 170, 171, 172, 173, 174, 175, 176, 177, 178, 179, 180, 181, 182, 183, 184, 185, 186, 187, 188, 189, 190, 191, 192, 193, 194, 195, 196, 197, 198, 199, 200, 201, 202, 203, 204, 205, 206, 207, 208, 209, 210, 211, 212, 213, 214, 215, 216, 217, 218, 219, 220, 221, 222, 223, 224, 225, 226, 227, 228, 229, 230, 231, 232, 233, 234, 235, 236, 237, 238, 239, 240, 241, 242, 243, 244, 245, 246, 247, 248, 249, 250, 251, 252, 253, 254, 255, 256, 257, 258, 259, 260, 261, 262, 263, 264, 265, 266, 267, 268, 269, 270, 271, 272, 273, 274, 275, 276, 277, 278, 279, 280, 281, 282, 283, 284, 285, 286, 287, 288, 289, 290, 291, 292, 293, 294, 295, 296, 297, 298, 299, 300, 301, 312, or 313, a variant, derivative, orthologue, paralogue or homologue thereof, in which:

[1098] the amino acid at Mutated site 4 is Pro, and the amino acid at Mutated site 5 is Glu.

[1099] In another preferred embodiment, the mutated PPO comprises a sequence of SEQ ID NO: 1, 2, 3, 4, 5, 6, 7, 8, 9, 10, 11, 12, 13, 14, 15, 16, 17, 18, 19, 20, 21, 22, 23, 24, 25, 26, 27, 28, 29, 30, 31, 32, 33, 34, 35, 36, 37, 38, 39, 40, 41, 42, 43, 44, 45, 46, 47, 48, 49, 50, 51, 52, 53, 54, 55, 56, 57, 58, 59, 60, 61, 62, 63, 64, 65, 66, 67, 68, 69, 70, 71, 72, 73, 74, 75, 76, 77, 78, 79, 80, 81, 82, 83, 84, 85, 86, 87, 88, 89, 90, 91, 92, 93, 94, 95, 96, 97, 98, 99, 100, 101, 102, 103, 104, 105, 106, 107, 108, 109, 110, 111, 112, 113, 114, 115, 116, 117, 118, 119, 120, 121, 122, 123, 124, 125, 126, 127, 128, 129, 130, 131, 132, 133, 134, 135, 136, 137, 138, 139, 140, 141, 142, 143, 144, 145, 146, 147, 148, 149, 150, 151, 152, 153, 154, 155, 156, 157, 158, 159, 160, 161, 162, 163, 164, 165, 166, 167, 168, 169, 170, 171, 172, 173, 174, 175, 176, 177, 178, 179, 180, 181, 182, 183, 184, 185, 186, 187, 188, 189, 190, 191, 192, 193, 194, 195, 196, 197, 198, 199, 200, 201, 202, 203, 204, 205, 206, 207, 208, 209, 210, 211, 212, 213, 214, 215, 216, 217, 218, 219, 220, 221, 222, 223, 224, 225, 226, 227, 228, 229, 230, 231, 232, 233, 234, 235, 236, 237, 238, 239, 240, 241, 242, 243, 244, 245, 246, 247, 248, 249, 250, 251, 252, 253, 254, 255, 256, 257, 258, 259, 260, 261, 262, 263, 264, 265, 266, 267, 268, 269, 270, 271, 272, 273, 274, 275, 276, 277, 278, 279, 280, 281, 282, 283, 284, 285, 286, 287, 288, 289, 290, 291, 292, 293, 294, 295, 296, 297, 298, 299, 300, 301, 312, or 313, a variant, derivative, orthologue, paralogue or homologue thereof, in which:

[1100] the amino acid at Mutated site 4 is Pro, and the amino acid at Mutated site 5 is Ser.

[1101] In another preferred embodiment, the mutated PPO comprises a sequence of SEQ ID NO: 1, 2, 3, 4, 5, 6, 7, 8, 9, 10, 11, 12, 13, 14, 15, 16, 17, 18, 19, 20, 21, 22, 23, 24, 25, 26, 27, 28, 29, 30, 31, 32, 33, 34, 35, 36, 37, 38, 39, 40, 41, 42, 43, 44, 45, 46, 47, 48, 49, 50, 51, 52, 53, 54, 55, 56, 57, 58, 59, 60, 61, 62, 63, 64, 65, 66, 67, 68, 69, 70, 71, 72, 73, 74, 75, 76, 77, 78, 79, 80, 81, 82, 83, 84, 85, 86, 87, 88, 89, 90, 91, 92, 93, 94, 95, 96, 97, 98, 99, 100, 101, 102, 103, 104, 105, 106, 107, 108, 109, 110, 111, 112, 113, 114, 115, 116, 117, 118, 119, 120, 121, 122, 123, 124, 125, 126, 127, 128, 129, 130, 131, 132, 133, 134, 135, 136, 137, 138, 139, 140, 141, 142, 143, 144, 145, 146, 147, 148, 149, 150, 151, 152, 153, 154, 155, 156, 157, 158, 159, 160, 161, 162, 163, 164, 165, 166, 167, 168, 169, 170, 171, 172, 173, 174, 175, 176, 177, 178, 179, 180, 181, 182, 183, 184, 185, 186, 187, 188, 189, 190, 191, 192, 193, 194, 195, 196, 197, 198, 199, 200, 201, 202, 203, 204, 205, 206, 207, 208, 209, 210, 211, 212, 213, 214, 215, 216, 217, 218, 219, 220, 221, 222, 223, 224, 225, 226, 227, 228, 229, 230, 231, 232, 233, 234, 235, 236, 237, 238, 239, 240, 241, 242, 243, 244, 245, 246, 247, 248, 249, 250, 251, 252, 253, 254, 255, 256, 257, 258, 259, 260, 261, 262, 263, 264, 265, 266, 267, 268, 269, 270, 271, 272, 273, 274, 275, 276, 277, 278, 279, 280, 281, 282, 283, 284, 285, 286, 287, 288, 289, 290, 291, 292, 293, 294, 295, 296, 297, 298, 299, 300, 301, 312, or 313, a variant, derivative, orthologue, paralogue or homologue thereof, in which:

[1102] the amino acid at Mutated site 4 is Pro, and the amino acid at Mutated site 5 is Thr.

[1103] In another preferred embodiment, the mutated PPO comprises a sequence of SEQ ID NO: 1, 2, 3, 4, 5, 6, 7, 8, 9, 10, 11, 12, 13, 14, 15, 16, 17, 18, 19, 20, 21, 22, 23, 24, 25, 26, 27, 28, 29, 30, 31, 32, 33, 34, 35, 36, 37, 38, 39, 40, 41, 42, 43, 44, 45, 46, 47, 48, 49, 50, 51, 52, 53, 54, 55, 56, 57, 58, 59, 60, 61, 62, 63, 64, 65, 66, 67, 68, 69, 70, 71, 72, 73, 74, 75, 76, 77, 78, 79, 80, 81, 82, 83, 84, 85, 86, 87, 88, 89, 90, 91, 92, 93, 94, 95, 96, 97, 98, 99, 100, 101, 102, 103, 104, 105, 106, 107, 108, 109, 110, 111, 112, 113, 114, 115, 116, 117, 118, 119, 120, 121, 122, 123, 124, 125, 126, 127, 128, 129, 130, 131, 132, 133, 134, 135, 136, 137, 138, 139, 140, 141, 142, 143, 144, 145, 146, 147, 148, 149, 150, 151, 152, 153, 154, 155, 156, 157, 158, 159, 160, 161, 162, 163, 164, 165, 166, 167, 168, 169, 170, 171, 172, 173, 174, 175, 176, 177, 178, 179, 180, 181, 182, 183, 184, 185, 186, 187, 188, 189, 190, 191, 192, 193, 194, 195, 196, 197, 198, 199, 200, 201, 202, 203, 204, 205, 206, 207, 208, 209, 210, 211, 212, 213, 214, 215, 216, 217, 218, 219, 220, 221, 222, 223, 224, 225, 226, 227, 228, 229, 230, 231, 232, 233, 234, 235, 236, 237, 238, 239, 240, 241, 242, 243, 244, 245, 246, 247, 248, 249, 250, 251, 252, 253, 254, 255, 256, 257, 258, 259, 260, 261, 262, 263, 264, 265, 266, 267, 268, 269, 270, 271, 272, 273, 274, 275, 276, 277, 278, 279, 280, 281, 282, 283, 284, 285, 286, 287, 288, 289, 290, 291, 292, 293, 294, 295, 296, 297, 298, 299, 300, 301, 312, or 313, a variant, derivative, orthologue, paralogue or homologue thereof, in which:

[1104] the amino acid at Mutated site 4 is Pro, and the amino acid at Mutated site 5 is Asn.

[1105] In another preferred embodiment, the mutated PPO comprises a sequence of SEQ ID NO: 1, 2, 3, 4, 5, 6, 7, 8, 9, 10, 11, 12, 13, 14, 15, 16, 17, 18, 19, 20, 21, 22, 23, 24, 25, 26, 27, 28, 29, 30, 31, 32, 33, 34, 35, 36, 37, 38, 39, 40, 41, 42, 43, 44, 45, 46, 47, 48, 49, 50, 51, 52, 53, 54, 55, 56, 57, 58, 59, 60, 61, 62, 63, 64, 65, 66, 67, 68, 69, 70, 71, 72, 73, 74, 75, 76, 77, 78, 79, 80, 81, 82, 83, 84, 85, 86, 87, 88, 89, 90, 91, 92, 93, 94, 95, 96, 97, 98, 99, 100, 101, 102, 103, 104, 105, 106, 107, 108, 109, 110, 111, 112, 113, 114, 115, 116, 117, 118, 119, 120, 121, 122, 123, 124, 125, 126, 127, 128, 129, 130, 131, 132, 133, 134, 135, 136, 137, 138, 139, 140, 141, 142, 143, 144, 145, 146, 147, 148, 149, 150, 151, 152, 153, 154, 155, 156, 157, 158, 159, 160, 161, 162, 163, 164, 165, 166, 167, 168, 169, 170, 171, 172, 173, 174, 175, 176, 177, 178, 179, 180, 181, 182, 183, 184, 185, 186, 187, 188, 189, 190, 191, 192, 193, 194, 195, 196, 197, 198, 199, 200, 201, 202, 203, 204, 205, 206, 207, 208, 209, 210, 211, 212, 213, 214, 215, 216, 217, 218, 219, 220, 221, 222, 223, 224, 225, 226, 227, 228, 229, 230, 231, 232, 233, 234, 235, 236, 237, 238, 239, 240, 241, 242, 243, 244, 245, 246, 247, 248, 249, 250, 251, 252, 253, 254, 255, 256, 257, 258, 259, 260, 261, 262, 263, 264, 265, 266, 267, 268, 269, 270, 271, 272, 273, 274, 275, 276, 277, 278, 279, 280, 281, 282, 283, 284, 285, 286, 287, 288, 289, 290, 291, 292, 293, 294, 295, 296, 297, 298, 299, 300, 301, 312, or 313, a variant, derivative, orthologue, paralogue or homologue thereof, in which:

[1106] the amino acid at Mutated site 4 is Pro, and the amino acid at Mutated site 5 is Gln.

[1107] In another preferred embodiment, the mutated PPO comprises a sequence of SEQ ID NO: 1, 2, 3, 4, 5, 6, 7, 8, 9, 10, 11, 12, 13, 14, 15, 16, 17, 18, 19, 20, 21, 22, 23, 24, 25, 26, 27, 28, 29, 30, 31, 32, 33, 34, 35, 36, 37, 38, 39, 40, 41, 42, 43, 44, 45, 46, 47, 48, 49, 50, 51, 52, 53, 54, 55, 56, 57, 58, 59, 60, 61, 62, 63, 64, 65, 66, 67, 68, 69, 70, 71, 72, 73, 74, 75, 76, 77, 78, 79, 80, 81, 82, 83, 84, 85, 86, 87, 88, 89, 90, 91, 92, 93, 94, 95, 96, 97, 98, 99, 100, 101, 102, 103, 104, 105, 106, 107, 108, 109, 110, 111, 112, 113, 114, 115, 116, 117, 118, 119, 120, 121, 122, 123, 124, 125, 126, 127, 128, 129, 130, 131, 132, 133, 134, 135, 136, 137, 138, 139, 140, 141, 142, 143, 144, 145, 146, 147, 148, 149, 150, 151, 152, 153, 154, 155, 156, 157, 158, 159, 160, 161, 162, 163, 164, 165, 166, 167, 168, 169, 170, 171, 172, 173, 174, 175, 176, 177, 178, 179, 180, 181, 182, 183, 184, 185, 186, 187, 188, 189, 190, 191, 192, 193, 194, 195, 196, 197, 198, 199, 200, 201, 202, 203, 204, 205, 206, 207, 208, 209, 210, 211, 212, 213, 214, 215, 216, 217, 218, 219, 220, 221, 222, 223, 224, 225, 226, 227, 228, 229, 230, 231, 232, 233, 234, 235, 236, 237, 238, 239, 240, 241, 242, 243, 244, 245, 246, 247, 248, 249, 250, 251, 252, 253, 254, 255, 256, 257, 258, 259, 260, 261, 262, 263, 264, 265, 266, 267, 268, 269, 270, 271, 272, 273, 274, 275, 276, 277, 278, 279, 280, 281, 282, 283, 284, 285, 286, 287, 288, 289, 290, 291, 292, 293, 294, 295, 296, 297, 298, 299, 300, 301, 312, or 313, a variant, derivative, orthologue, paralogue or homologue thereof, in which:

[1108] the amino acid at Mutated site 4 is Pro, and the amino acid at Mutated site 5 is Cys.

[1109] In another preferred embodiment, the mutated PPO comprises a sequence of SEQ ID NO: 1, 2, 3, 4, 5, 6, 7, 8, 9, 10, 11, 12, 13, 14, 15, 16, 17, 18, 19, 20, 21, 22, 23, 24, 25, 26, 27, 28, 29, 30, 31, 32, 33, 34, 35, 36, 37, 38, 39, 40, 41, 42, 43, 44, 45, 46, 47, 48, 49, 50, 51, 52, 53, 54, 55, 56, 57, 58, 59, 60, 61, 62, 63, 64, 65, 66, 67, 68, 69, 70, 71, 72, 73, 74, 75, 76, 77, 78, 79, 80, 81, 82, 83, 84, 85, 86, 87, 88, 89, 90, 91, 92, 93, 94, 95, 96, 97, 98, 99, 100, 101, 102, 103, 104, 105, 106, 107, 108, 109, 110, 111, 112, 113, 114, 115, 116, 117, 118, 119, 120, 121, 122, 123, 124, 125, 126, 127, 128, 129, 130, 131, 132, 133, 134, 135, 136, 137, 138, 139, 140, 141, 142, 143, 144, 145, 146, 147, 148, 149, 150, 151, 152, 153, 154, 155, 156, 157, 158, 159, 160, 161, 162, 163, 164, 165, 166, 167, 168, 169, 170, 171, 172, 173, 174, 175, 176, 177, 178, 179, 180, 181, 182, 183, 184, 185, 186, 187, 188, 189, 190, 191, 192, 193, 194, 195, 196, 197, 198, 199, 200, 201, 202, 203, 204, 205, 206, 207, 208, 209, 210, 211, 212, 213, 214, 215, 216, 217, 218, 219, 220, 221, 222, 223, 224, 225, 226, 227, 228, 229, 230, 231, 232, 233, 234, 235, 236, 237, 238, 239, 240, 241, 242, 243, 244, 245, 246, 247, 248, 249, 250, 251, 252, 253, 254, 255, 256, 257, 258, 259, 260, 261, 262, 263, 264, 265, 266, 267, 268, 269, 270, 271, 272, 273, 274, 275, 276, 277, 278, 279, 280, 281, 282, 283, 284, 285, 286, 287, 288, 289, 290, 291, 292, 293, 294, 295, 296, 297, 298, 299, 300, 301, 312, or 313, a variant, derivative, orthologue, paralogue or homologue thereof, in which:

[1110] the amino acid at Mutated site 4 is Pro, and the amino acid at Mutated site 5 is Gly.

[1111] In another preferred embodiment, the mutated PPO comprises a sequence of SEQ ID NO: 1, 2, 3, 4, 5, 6, 7, 8, 9, 10, 11, 12, 13, 14, 15, 16, 17, 18, 19, 20, 21, 22, 23, 24, 25, 26, 27, 28, 29, 30, 31, 32, 33, 34, 35, 36, 37, 38, 39, 40, 41, 42, 43, 44, 45, 46, 47, 48, 49, 50, 51, 52, 53, 54, 55, 56, 57, 58, 59, 60, 61, 62, 63, 64, 65, 66, 67, 68, 69, 70, 71, 72, 73, 74, 75, 76, 77, 78, 79, 80, 81, 82, 83, 84, 85, 86, 87, 88, 89, 90, 91, 92, 93, 94, 95, 96, 97, 98, 99, 100, 101, 102, 103, 104, 105, 106, 107, 108, 109, 110, 111, 112, 113, 114, 115, 116, 117, 118, 119, 120, 121, 122, 123, 124, 125, 126, 127, 128, 129, 130, 131, 132, 133, 134, 135, 136, 137, 138, 139, 140, 141, 142, 143, 144, 145, 146, 147, 148, 149, 150, 151, 152, 153, 154, 155, 156, 157, 158, 159, 160, 161, 162, 163, 164, 165, 166, 167, 168, 169, 170, 171, 172, 173, 174, 175, 176, 177, 178, 179, 180, 181, 182, 183, 184, 185, 186, 187, 188, 189, 190, 191, 192, 193, 194, 195, 196, 197, 198, 199, 200, 201, 202, 203, 204, 205, 206, 207, 208, 209, 210, 211, 212, 213, 214, 215, 216, 217, 218, 219, 220, 221, 222, 223, 224, 225, 226, 227, 228, 229, 230, 231, 232, 233, 234, 235, 236, 237, 238, 239, 240, 241, 242, 243, 244, 245, 246, 247, 248, 249, 250, 251, 252, 253, 254, 255, 256, 257, 258, 259, 260, 261, 262, 263, 264, 265, 266, 267, 268, 269, 270, 271, 272, 273, 274, 275, 276, 277, 278, 279, 280, 281, 282, 283, 284, 285, 286, 287, 288, 289, 290, 291, 292, 293, 294, 295, 296, 297, 298, 299, 300, 301, 312, or 313, a variant, derivative, orthologue, paralogue or homologue thereof, in which:

[1112] the amino acid at Mutated site 4 is Pro, and the amino acid at Mutated site 5 is Pro.

[1113] In another preferred embodiment, the mutated PPO comprises a sequence of SEQ ID NO: 1, 2, 3, 4, 5, 6, 7, 8, 9, 10, 11, 12, 13, 14, 15, 16, 17, 18, 19, 20, 21, 22, 23, 24, 25, 26, 27, 28, 29, 30, 31, 32, 33, 34, 35, 36, 37, 38, 39, 40, 41, 42, 43, 44, 45, 46, 47, 48, 49, 50, 51, 52, 53, 54, 55, 56, 57, 58, 59, 60, 61, 62, 63, 64, 65, 66, 67, 68, 69, 70, 71, 72, 73, 74, 75, 76, 77, 78, 79, 80, 81, 82, 83, 84, 85, 86, 87, 88, 89, 90, 91, 92, 93, 94, 95, 96, 97, 98, 99, 100, 101, 102, 103, 104, 105, 106, 107, 108, 109, 110, 111, 112, 113, 114, 115, 116, 117, 118, 119, 120, 121, 122, 123, 124, 125, 126, 127, 128, 129, 130, 131, 132, 133, 134, 135, 136, 137, 138, 139, 140, 141, 142, 143, 144, 145, 146, 147, 148, 149, 150, 151, 152, 153, 154, 155, 156, 157, 158, 159, 160, 161, 162, 163, 164, 165, 166, 167, 168, 169, 170, 171, 172, 173, 174, 175, 176, 177, 178, 179, 180, 181, 182, 183, 184, 185, 186, 187, 188, 189, 190, 191, 192, 193, 194, 195, 196, 197, 198, 199, 200, 201, 202, 203, 204, 205, 206, 207, 208, 209, 210, 211, 212, 213, 214, 215, 216, 217, 218, 219, 220, 221, 222, 223, 224, 225, 226, 227, 228, 229, 230, 231, 232, 233, 234, 235, 236, 237, 238, 239, 240, 241, 242, 243, 244, 245, 246, 247, 248, 249, 250, 251, 252, 253, 254, 255, 256, 257, 258, 259, 260, 261, 262, 263, 264, 265, 266, 267, 268, 269, 270, 271, 272, 273, 274, 275, 276, 277, 278, 279, 280, 281, 282, 283, 284, 285, 286, 287, 288, 289, 290, 291, 292, 293, 294, 295, 296, 297, 298, 299, 300, 301, 312, or 313, a variant, derivative, orthologue, paralogue or homologue thereof, in which:

[1114] the amino acid at Mutated site 4 is Pro, and the amino acid at Mutated site 5 is Arg.

[1115] In another preferred embodiment, the mutated PPO comprises a sequence of SEQ ID NO: 1, 2, 3, 4, 5, 6, 7, 8, 9, 10, 11, 12, 13, 14, 15, 16, 17, 18, 19, 20, 21, 22, 23, 24, 25, 26, 27, 28, 29, 30, 31, 32, 33, 34, 35, 36, 37, 38, 39, 40, 41, 42, 43, 44, 45, 46, 47, 48, 49, 50, 51, 52, 53, 54, 55, 56, 57, 58, 59, 60, 61, 62, 63, 64, 65, 66, 67, 68, 69, 70, 71, 72, 73, 74, 75, 76, 77, 78, 79, 80, 81, 82, 83, 84, 85, 86, 87, 88, 89, 90, 91, 92, 93, 94, 95, 96, 97, 98, 99, 100, 101, 102, 103, 104, 105, 106, 107, 108, 109, 110, 111, 112, 113, 114, 115, 116, 117, 118, 119, 120, 121, 122, 123, 124, 125, 126, 127, 128, 129, 130, 131, 132, 133, 134, 135, 136, 137, 138, 139, 140, 141, 142, 143, 144, 145, 146, 147, 148, 149, 150, 151, 152, 153, 154, 155, 156, 157, 158, 159, 160, 161, 162, 163, 164, 165, 166, 167, 168, 169, 170, 171, 172, 173, 174, 175, 176, 177, 178, 179, 180, 181, 182, 183, 184, 185, 186, 187, 188, 189, 190, 191, 192, 193, 194, 195, 196, 197, 198, 199, 200, 201, 202, 203, 204, 205, 206, 207, 208, 209, 210, 211, 212, 213, 214, 215, 216, 217, 218, 219, 220, 221, 222, 223, 224, 225, 226, 227, 228, 229, 230, 231, 232, 233, 234, 235, 236, 237, 238, 239, 240, 241, 242, 243, 244, 245, 246, 247, 248, 249, 250, 251, 252, 253, 254, 255, 256, 257, 258, 259, 260, 261, 262, 263, 264, 265, 266, 267, 268, 269, 270, 271, 272, 273, 274, 275, 276, 277, 278, 279, 280, 281, 282, 283, 284, 285, 286, 287, 288, 289, 290, 291, 292, 293, 294, 295, 296, 297, 298, 299, 300, 301, 312, or 313, a variant, derivative, orthologue, paralogue or homologue thereof, in which:

[1116] the amino acid at Mutated site 4 is Pro, and the amino acid at Mutated site 5 is Tyr.

[1117] In another preferred embodiment, the mutated PPO comprises a sequence of SEQ ID NO: 1, 2, 3, 4, 5, 6, 7, 8, 9, 10, 11, 12, 13, 14, 15, 16, 17, 18, 19, 20, 21, 22, 23, 24, 25, 26, 27, 28, 29, 30, 31, 32, 33, 34, 35, 36, 37, 38, 39, 40, 41, 42, 43, 44, 45, 46, 47, 48, 49, 50, 51, 52, 53, 54, 55, 56, 57, 58, 59, 60, 61, 62, 63, 64, 65, 66, 67, 68, 69, 70, 71, 72, 73, 74, 75, 76, 77, 78, 79, 80, 81, 82, 83, 84, 85, 86, 87, 88, 89, 90, 91, 92, 93, 94, 95, 96, 97, 98, 99, 100, 101, 102, 103, 104, 105, 106, 107, 108, 109, 110, 111, 112, 113, 114, 115, 116, 117, 118, 119, 120, 121, 122, 123, 124, 125, 126, 127, 128, 129, 130, 131, 132, 133, 134, 135, 136, 137, 138, 139, 140, 141, 142, 143, 144, 145, 146, 147, 148, 149, 150, 151, 152, 153, 154, 155, 156, 157, 158, 159, 160, 161, 162, 163, 164, 165, 166, 167, 168, 169, 170, 171, 172, 173, 174, 175, 176, 177, 178, 179, 180, 181, 182, 183, 184, 185, 186, 187, 188, 189, 190, 191, 192, 193, 194, 195, 196, 197, 198, 199, 200, 201, 202, 203, 204, 205, 206, 207, 208, 209, 210, 211, 212, 213, 214, 215, 216, 217, 218, 219, 220, 221, 222, 223, 224, 225, 226, 227, 228, 229, 230, 231, 232, 233, 234, 235, 236, 237, 238, 239, 240, 241, 242, 243, 244, 245, 246, 247, 248, 249, 250, 251, 252, 253, 254, 255, 256, 257, 258, 259, 260, 261, 262, 263, 264, 265, 266, 267, 268, 269, 270, 271, 272, 273, 274, 275, 276, 277, 278, 279, 280, 281, 282, 283, 284, 285, 286, 287, 288, 289, 290, 291, 292, 293, 294, 295, 296, 297, 298, 299, 300, 301, 312, or 313, a variant, derivative, orthologue, paralogue or homologue thereof, in which:

[1118] the amino acid at Mutated site 4 is Pro, and the amino acid at Mutated site 5 is Trp.

[1119] In another preferred embodiment, the mutated PPO comprises a sequence of SEQ ID NO: 1, 2, 3, 4, 5, 6, 7, 8, 9, 10, 11, 12, 13, 14, 15, 16, 17, 18, 19, 20, 21, 22, 23, 24, 25, 26, 27, 28, 29, 30, 31, 32, 33, 34, 35, 36, 37, 38, 39, 40, 41, 42, 43, 44, 45, 46, 47, 48, 49, 50, 51, 52, 53, 54, 55, 56, 57, 58, 59, 60, 61, 62, 63, 64, 65, 66, 67, 68, 69, 70, 71, 72, 73, 74, 75, 76, 77, 78, 79, 80, 81, 82, 83, 84, 85, 86, 87, 88, 89, 90, 91, 92, 93, 94, 95, 96, 97, 98, 99, 100, 101, 102, 103, 104, 105, 106, 107, 108, 109, 110, 111, 112, 113, 114, 115, 116, 117, 118, 119, 120, 121, 122, 123, 124, 125, 126, 127, 128, 129, 130, 131, 132, 133, 134, 135, 136, 137, 138, 139, 140, 141, 142, 143, 144, 145, 146, 147, 148, 149, 150, 151, 152, 153, 154, 155, 156, 157, 158, 159, 160, 161, 162, 163, 164, 165, 166, 167, 168, 169, 170, 171, 172, 173, 174, 175, 176, 177, 178, 179, 180, 181, 182, 183, 184, 185, 186, 187, 188, 189, 190, 191, 192, 193, 194, 195, 196, 197, 198, 199, 200, 201, 202, 203, 204, 205, 206, 207, 208, 209, 210, 211, 212, 213, 214, 215, 216, 217, 218, 219, 220, 221, 222, 223, 224, 225, 226, 227, 228, 229, 230, 231, 232, 233, 234, 235, 236, 237, 238, 239, 240, 241, 242, 243, 244, 245, 246, 247, 248, 249, 250, 251, 252, 253, 254, 255, 256, 257, 258, 259, 260, 261, 262, 263, 264, 265, 266, 267, 268, 269, 270, 271, 272, 273, 274, 275, 276, 277, 278, 279, 280, 281, 282, 283, 284, 285, 286, 287, 288, 289, 290, 291, 292, 293, 294, 295, 296, 297, 298, 299, 300, 301, 312, or 313, a variant, derivative, orthologue, paralogue or homologue thereof, in which:

[1120] the amino acid at Mutated site 4 is Phe, and the amino acid at Mutated site 5 is Ala.

[1121] In another preferred embodiment, the mutated PPO comprises a sequence of SEQ ID NO: 1, 2, 3, 4, 5, 6, 7, 8, 9, 10, 11, 12, 13, 14, 15, 16, 17, 18, 19, 20, 21, 22, 23, 24, 25, 26, 27, 28, 29, 30, 31, 32, 33, 34, 35, 36, 37, 38, 39, 40, 41, 42, 43, 44, 45, 46, 47, 48, 49, 50, 51, 52, 53, 54, 55, 56, 57, 58, 59, 60, 61, 62, 63, 64, 65, 66, 67, 68, 69, 70, 71, 72, 73, 74, 75, 76, 77, 78, 79, 80, 81, 82, 83, 84, 85, 86, 87, 88, 89, 90, 91, 92, 93, 94, 95, 96, 97, 98, 99, 100, 101, 102, 103, 104, 105, 106, 107, 108, 109, 110, 111, 112, 113, 114, 115, 116, 117, 118, 119, 120, 121, 122, 123, 124, 125, 126, 127, 128, 129, 130, 131, 132, 133, 134, 135, 136, 137, 138, 139, 140, 141, 142, 143, 144, 145, 146, 147, 148, 149, 150, 151, 152, 153, 154, 155, 156, 157, 158, 159, 160, 161, 162, 163, 164, 165, 166, 167, 168, 169, 170, 171, 172, 173, 174, 175, 176, 177, 178, 179, 180, 181, 182, 183, 184, 185, 186, 187, 188, 189, 190, 191, 192, 193, 194, 195, 196, 197, 198, 199, 200, 201, 202, 203, 204, 205, 206, 207, 208, 209, 210, 211, 212, 213, 214, 215, 216, 217, 218, 219, 220, 221, 222, 223, 224, 225, 226, 227, 228, 229, 230, 231, 232, 233, 234, 235, 236, 237, 238, 239, 240, 241, 242, 243, 244, 245, 246, 247, 248, 249, 250, 251, 252, 253, 254, 255, 256, 257, 258, 259, 260, 261, 262, 263, 264, 265, 266, 267, 268, 269, 270, 271, 272, 273, 274, 275, 276, 277, 278, 279, 280, 281, 282, 283, 284, 285, 286, 287, 288, 289, 290, 291, 292, 293, 294, 295, 296, 297, 298, 299, 300, 301, 312, or 313, a variant, derivative, orthologue, paralogue or homologue thereof, in which:

[1122] the amino acid at Mutated site 4 is Phe, and the amino acid at Mutated site 5 is Leu.

[1123] In another preferred embodiment, the mutated PPO comprises a sequence of SEQ ID NO: 1, 2, 3, 4, 5, 6, 7, 8, 9, 10, 11, 12, 13, 14, 15, 16, 17, 18, 19, 20, 21, 22, 23, 24, 25, 26, 27, 28, 29, 30, 31, 32, 33, 34, 35, 36, 37, 38, 39, 40, 41, 42, 43, 44, 45, 46, 47, 48, 49, 50, 51, 52, 53, 54, 55, 56, 57, 58, 59, 60, 61, 62, 63, 64, 65, 66, 67, 68, 69, 70, 71, 72, 73, 74, 75, 76, 77, 78, 79, 80, 81, 82, 83, 84, 85, 86, 87, 88, 89, 90, 91, 92, 93, 94, 95, 96, 97, 98, 99, 100, 101, 102, 103, 104, 105, 106, 107, 108, 109, 110, 111, 112, 113, 114, 115, 116, 117, 118, 119, 120, 121, 122, 123, 124, 125, 126, 127, 128, 129, 130, 131, 132, 133, 134, 135, 136, 137, 138, 139, 140, 141, 142, 143, 144, 145, 146, 147, 148, 149, 150, 151, 152, 153, 154, 155, 156, 157, 158, 159, 160, 161, 162, 163, 164, 165, 166, 167, 168, 169, 170, 171, 172, 173, 174, 175, 176, 177, 178, 179, 180, 181, 182, 183, 184, 185, 186, 187, 188, 189, 190, 191, 192, 193, 194, 195, 196, 197, 198, 199, 200, 201, 202, 203, 204, 205, 206, 207, 208, 209, 210, 211, 212, 213, 214, 215, 216, 217, 218, 219, 220, 221, 222, 223, 224, 225, 226, 227, 228, 229, 230, 231, 232, 233, 234, 235, 236, 237, 238, 239, 240, 241, 242, 243, 244, 245, 246, 247, 248, 249, 250, 251, 252, 253, 254, 255, 256, 257, 258, 259, 260, 261, 262, 263, 264, 265, 266, 267, 268, 269, 270, 271, 272, 273, 274, 275, 276, 277, 278, 279, 280, 281, 282, 283, 284, 285, 286, 287, 288, 289, 290, 291, 292, 293, 294, 295, 296, 297, 298, 299, 300, 301, 312, or 313, a variant, derivative, orthologue, paralogue or homologue thereof, in which:

[1124] the amino acid at Mutated site 4 is Phe, and the amino acid at Mutated site 5 is Val.

[1125] In another preferred embodiment, the mutated PPO comprises a sequence of SEQ ID NO: 1, 2, 3, 4, 5, 6, 7, 8, 9, 10, 11, 12, 13, 14, 15, 16, 17, 18, 19, 20, 21, 22, 23, 24, 25, 26, 27, 28, 29, 30, 31, 32, 33, 34, 35, 36, 37, 38, 39, 40, 41, 42, 43, 44, 45, 46, 47, 48, 49, 50, 51, 52, 53, 54, 55, 56, 57, 58, 59, 60, 61, 62, 63, 64, 65, 66, 67, 68, 69, 70, 71, 72, 73, 74, 75, 76, 77, 78, 79, 80, 81, 82, 83, 84, 85, 86, 87, 88, 89, 90, 91, 92, 93, 94, 95, 96, 97, 98, 99, 100, 101, 102, 103, 104, 105, 106, 107, 108, 109, 110, 111, 112, 113, 114, 115, 116, 117, 118, 119, 120, 121, 122, 123, 124, 125, 126, 127, 128, 129, 130, 131, 132, 133, 134, 135, 136, 137, 138, 139, 140, 141, 142, 143, 144, 145, 146, 147, 148, 149, 150, 151, 152, 153, 154, 155, 156, 157, 158, 159, 160, 161, 162, 163, 164, 165, 166, 167, 168, 169, 170, 171, 172, 173, 174, 175, 176, 177, 178, 179, 180, 181, 182, 183, 184, 185, 186, 187, 188, 189, 190, 191, 192, 193, 194, 195, 196, 197, 198, 199, 200, 201, 202, 203, 204, 205, 206, 207, 208, 209, 210, 211, 212, 213, 214, 215, 216, 217, 218, 219, 220, 221, 222, 223, 224, 225, 226, 227, 228, 229, 230, 231, 232, 233, 234, 235, 236, 237, 238, 239, 240, 241, 242, 243, 244, 245, 246, 247, 248, 249, 250, 251, 252, 253, 254, 255, 256, 257, 258, 259, 260, 261, 262, 263, 264, 265, 266, 267, 268, 269, 270, 271, 272, 273, 274, 275, 276, 277, 278, 279, 280, 281, 282, 283, 284, 285, 286, 287, 288, 289, 290, 291, 292, 293, 294, 295, 296, 297, 298, 299, 300, 301, 312, or 313, a variant, derivative, orthologue, paralogue or homologue thereof, in which:

[1126] the amino acid at Mutated site 4 is Phe, and the amino acid at Mutated site 5 is Ile.

[1127] In another preferred embodiment, the mutated PPO comprises a sequence of SEQ ID NO: 1, 2, 3, 4, 5, 6, 7, 8, 9, 10, 11, 12, 13, 14, 15, 16, 17, 18, 19, 20, 21, 22, 23, 24, 25, 26, 27, 28, 29, 30, 31, 32, 33, 34, 35, 36, 37, 38, 39, 40, 41, 42, 43, 44, 45, 46, 47, 48, 49, 50, 51, 52, 53, 54, 55, 56, 57, 58, 59, 60, 61, 62, 63, 64, 65, 66, 67, 68, 69, 70, 71, 72, 73, 74, 75, 76, 77, 78, 79, 80, 81, 82, 83, 84, 85, 86, 87, 88, 89, 90, 91, 92, 93, 94, 95, 96, 97, 98, 99, 100, 101, 102, 103, 104, 105, 106, 107, 108, 109, 110, 111, 112, 113, 114, 115, 116, 117, 118, 119, 120, 121, 122, 123, 124, 125, 126, 127, 128, 129, 130, 131, 132, 133, 134, 135, 136, 137, 138, 139, 140, 141, 142, 143, 144, 145, 146, 147, 148, 149, 150, 151, 152, 153, 154, 155, 156, 157, 158, 159, 160, 161, 162, 163, 164, 165, 166, 167, 168, 169, 170, 171, 172, 173, 174, 175, 176, 177, 178, 179, 180, 181, 182, 183, 184, 185, 186, 187, 188, 189, 190, 191, 192, 193, 194, 195, 196, 197, 198, 199, 200, 201, 202, 203, 204, 205, 206, 207, 208, 209, 210, 211, 212, 213, 214, 215, 216, 217, 218, 219, 220, 221, 222, 223, 224, 225, 226, 227, 228, 229, 230, 231, 232, 233, 234, 235, 236, 237, 238, 239, 240, 241, 242, 243, 244, 245, 246, 247, 248, 249, 250, 251, 252, 253, 254, 255, 256, 257, 258, 259, 260, 261, 262, 263, 264, 265, 266, 267, 268, 269, 270, 271, 272, 273, 274, 275, 276, 277, 278, 279, 280, 281, 282, 283, 284, 285, 286, 287, 288, 289, 290, 291, 292, 293, 294, 295, 296, 297, 298, 299, 300, 301, 312, or 313, a variant, derivative, orthologue, paralogue or homologue thereof, in which:

[1128] the amino acid at Mutated site 4 is Phe, and the amino acid at Mutated site 5 is Met.

[1129] In another preferred embodiment, the mutated PPO comprises a sequence of SEQ ID NO: 1, 2, 3, 4, 5, 6, 7, 8, 9, 10, 11, 12, 13, 14, 15, 16, 17, 18, 19, 20, 21, 22, 23, 24, 25, 26, 27, 28, 29, 30, 31, 32, 33, 34, 35, 36, 37, 38, 39, 40, 41, 42, 43, 44, 45, 46, 47, 48, 49, 50, 51, 52, 53, 54, 55, 56, 57, 58, 59, 60, 61, 62, 63, 64, 65, 66, 67, 68, 69, 70, 71, 72, 73, 74, 75, 76, 77, 78, 79, 80, 81, 82, 83, 84, 85, 86, 87, 88, 89, 90, 91, 92, 93, 94, 95, 96, 97, 98, 99, 100, 101, 102, 103, 104, 105, 106, 107, 108, 109, 110, 111, 112, 113, 114, 115, 116, 117, 118, 119, 120, 121, 122, 123, 124, 125, 126, 127, 128, 129, 130, 131, 132, 133, 134, 135, 136, 137, 138, 139, 140, 141, 142, 143, 144, 145, 146, 147, 148, 149, 150, 151, 152, 153, 154, 155, 156, 157, 158, 159, 160, 161, 162, 163, 164, 165, 166, 167, 168, 169, 170, 171, 172, 173, 174, 175, 176, 177, 178, 179, 180, 181, 182, 183, 184, 185, 186, 187, 188, 189, 190, 191, 192, 193, 194, 195, 196, 197, 198, 199, 200, 201, 202, 203, 204, 205, 206, 207, 208, 209, 210, 211, 212, 213, 214, 215, 216, 217, 218, 219, 220, 221, 222, 223, 224, 225, 226, 227, 228, 229, 230, 231, 232, 233, 234, 235, 236, 237, 238, 239, 240, 241, 242, 243, 244, 245, 246, 247, 248, 249, 250, 251, 252, 253, 254, 255, 256, 257, 258, 259, 260, 261, 262, 263, 264, 265, 266, 267, 268, 269, 270, 271, 272, 273, 274, 275, 276, 277, 278, 279, 280, 281, 282, 283, 284, 285, 286, 287, 288, 289, 290, 291, 292, 293, 294, 295, 296, 297, 298, 299, 300, 301, 312, or 313, a variant, derivative, orthologue, paralogue or homologue thereof, in which:

[1130] the amino acid at Mutated site 4 is Phe, and the amino acid at Mutated site 5 is His.

[1131] In another preferred embodiment, the mutated PPO comprises a sequence of SEQ ID NO: 1, 2, 3, 4, 5, 6, 7, 8, 9, 10, 11, 12, 13, 14, 15, 16, 17, 18, 19, 20, 21, 22, 23, 24, 25, 26, 27, 28, 29, 30, 31, 32, 33, 34, 35, 36, 37, 38, 39, 40, 41, 42, 43, 44, 45, 46, 47, 48, 49, 50, 51, 52, 53, 54, 55, 56, 57, 58, 59, 60, 61, 62, 63, 64, 65, 66, 67, 68, 69, 70, 71, 72, 73, 74, 75, 76, 77, 78, 79, 80, 81, 82, 83, 84, 85, 86, 87, 88, 89, 90, 91, 92, 93, 94, 95, 96, 97, 98, 99, 100, 101, 102, 103, 104, 105, 106, 107, 108, 109, 110, 111, 112, 113, 114, 115, 116, 117, 118, 119, 120, 121, 122, 123, 124, 125, 126, 127, 128, 129, 130, 131, 132, 133, 134, 135, 136, 137, 138, 139, 140, 141, 142, 143, 144, 145, 146, 147, 148, 149, 150, 151, 152, 153, 154, 155, 156, 157, 158, 159, 160, 161, 162, 163, 164, 165, 166, 167, 168, 169, 170, 171, 172, 173, 174, 175, 176, 177, 178, 179, 180, 181, 182, 183, 184, 185, 186, 187, 188, 189, 190, 191, 192, 193, 194, 195, 196, 197, 198, 199, 200, 201, 202, 203, 204, 205, 206, 207, 208, 209, 210, 211, 212, 213, 214, 215, 216, 217, 218, 219, 220, 221, 222, 223, 224, 225, 226, 227, 228, 229, 230, 231, 232, 233, 234, 235, 236, 237, 238, 239, 240, 241, 242, 243, 244, 245, 246, 247, 248, 249, 250, 251, 252, 253, 254, 255, 256, 257, 258, 259, 260, 261, 262, 263, 264, 265, 266, 267, 268, 269, 270, 271, 272, 273, 274, 275, 276, 277, 278, 279, 280, 281, 282, 283, 284, 285, 286, 287, 288, 289, 290, 291, 292, 293, 294, 295, 296, 297, 298, 299, 300, 301, 312, or 313, a variant, derivative, orthologue, paralogue or homologue thereof, in which:

[1132] the amino acid at Mutated site 4 is Phe, and the amino acid at Mutated site 5 is Lys.

[1133] In another preferred embodiment, the mutated PPO comprises a sequence of SEQ ID NO: 1, 2, 3, 4, 5, 6, 7, 8, 9, 10, 11, 12, 13, 14, 15, 16, 17, 18, 19, 20, 21, 22, 23, 24, 25, 26, 27, 28, 29, 30, 31, 32, 33, 34, 35, 36, 37, 38, 39, 40, 41, 42, 43, 44, 45, 46, 47, 48, 49, 50, 51, 52, 53, 54, 55, 56, 57, 58, 59, 60, 61, 62, 63, 64, 65, 66, 67, 68, 69, 70, 71, 72, 73, 74, 75, 76, 77, 78, 79, 80, 81, 82, 83, 84, 85, 86, 87, 88, 89, 90, 91, 92, 93, 94, 95, 96, 97, 98, 99, 100, 101, 102, 103, 104, 105, 106, 107, 108, 109, 110, 111, 112, 113, 114, 115, 116, 117, 118, 119, 120, 121, 122, 123, 124, 125, 126, 127, 128, 129, 130, 131, 132, 133, 134, 135, 136, 137, 138, 139, 140, 141, 142, 143, 144, 145, 146, 147, 148, 149, 150, 151, 152, 153, 154, 155, 156, 157, 158, 159, 160, 161, 162, 163, 164, 165, 166, 167, 168, 169, 170, 171, 172, 173, 174, 175, 176, 177, 178, 179, 180, 181, 182, 183, 184, 185, 186, 187, 188, 189, 190, 191, 192, 193, 194, 195, 196, 197, 198, 199, 200, 201, 202, 203, 204, 205, 206, 207, 208, 209, 210, 211, 212, 213, 214, 215, 216, 217, 218, 219, 220, 221, 222, 223, 224, 225, 226, 227, 228, 229, 230, 231, 232, 233, 234, 235, 236, 237, 238, 239, 240, 241, 242, 243, 244, 245, 246, 247, 248, 249, 250, 251, 252, 253, 254, 255, 256, 257, 258, 259, 260, 261, 262, 263, 264, 265, 266, 267, 268, 269, 270, 271, 272, 273, 274, 275, 276, 277, 278, 279, 280, 281, 282, 283, 284, 285, 286, 287, 288, 289, 290, 291, 292, 293, 294, 295, 296, 297, 298, 299, 300, 301, 312, or 313, a variant, derivative, orthologue, paralogue or homologue thereof, in which:

[1134] the amino acid at Mutated site 4 is Phe, and the amino acid at Mutated site 5 is Asp.

[1135] In another preferred embodiment, the mutated PPO comprises a sequence of SEQ ID NO: 1, 2, 3, 4, 5, 6, 7, 8, 9, 10, 11, 12, 13, 14, 15, 16, 17, 18, 19, 20, 21, 22, 23, 24, 25, 26, 27, 28, 29, 30, 31, 32, 33, 34, 35, 36, 37, 38, 39, 40, 41, 42, 43, 44, 45, 46, 47, 48, 49, 50, 51, 52, 53, 54, 55, 56, 57, 58, 59, 60, 61, 62, 63, 64, 65, 66, 67, 68, 69, 70, 71, 72, 73, 74, 75, 76, 77, 78, 79, 80, 81, 82, 83, 84, 85, 86, 87, 88, 89, 90, 91, 92, 93, 94, 95, 96, 97, 98, 99, 100, 101, 102, 103, 104, 105, 106, 107, 108, 109, 110, 111, 112, 113, 114, 115, 116, 117, 118, 119, 120, 121, 122, 123, 124, 125, 126, 127, 128, 129, 130, 131, 132, 133, 134, 135, 136, 137, 138, 139, 140, 141, 142, 143, 144, 145, 146, 147, 148, 149, 150, 151, 152, 153, 154, 155, 156, 157, 158, 159, 160, 161, 162, 163, 164, 165, 166, 167, 168, 169, 170, 171, 172, 173, 174, 175, 176, 177, 178, 179, 180, 181, 182, 183, 184, 185, 186, 187, 188, 189, 190, 191, 192, 193, 194, 195, 196, 197, 198, 199, 200, 201, 202, 203, 204, 205, 206, 207, 208, 209, 210, 211, 212, 213, 214, 215, 216, 217, 218, 219, 220, 221, 222, 223, 224, 225, 226, 227, 228, 229, 230, 231, 232, 233, 234, 235, 236, 237, 238, 239, 240, 241, 242, 243, 244, 245, 246, 247, 248, 249, 250, 251, 252, 253, 254, 255, 256, 257, 258, 259, 260, 261, 262, 263, 264, 265, 266, 267, 268, 269, 270, 271, 272, 273, 274, 275, 276, 277, 278, 279, 280, 281, 282, 283, 284, 285, 286, 287, 288, 289, 290, 291, 292, 293, 294, 295, 296, 297, 298, 299, 300, 301, 312, or 313, a variant, derivative, orthologue, paralogue or homologue thereof, in which:

[1136] the amino acid at Mutated site 4 is Phe, and the amino acid at Mutated site 5 is Glu.

[1137] In another preferred embodiment, the mutated PPO comprises a sequence of SEQ ID NO: 1, 2, 3, 4, 5, 6, 7, 8, 9, 10, 11, 12, 13, 14, 15, 16, 17, 18, 19, 20, 21, 22, 23, 24, 25, 26, 27, 28, 29, 30, 31, 32, 33, 34, 35, 36, 37, 38, 39, 40, 41, 42, 43, 44, 45, 46, 47, 48, 49, 50, 51, 52, 53, 54, 55, 56, 57, 58, 59, 60, 61, 62, 63, 64, 65, 66, 67, 68, 69, 70, 71, 72, 73, 74, 75, 76, 77, 78, 79, 80, 81, 82, 83, 84, 85, 86, 87, 88, 89, 90, 91, 92, 93, 94, 95, 96, 97, 98, 99, 100, 101, 102, 103, 104, 105, 106, 107, 108, 109, 110, 111, 112, 113, 114, 115, 116, 117, 118, 119, 120, 121, 122, 123, 124, 125, 126, 127, 128, 129, 130, 131, 132, 133, 134, 135, 136, 137, 138, 139, 140, 141, 142, 143, 144, 145, 146, 147, 148, 149, 150, 151, 152, 153, 154, 155, 156, 157, 158, 159, 160, 161, 162, 163, 164, 165, 166, 167, 168, 169, 170, 171, 172, 173, 174, 175, 176, 177, 178, 179, 180, 181, 182, 183, 184, 185, 186, 187, 188, 189, 190, 191, 192, 193, 194, 195, 196, 197, 198, 199, 200, 201, 202, 203, 204, 205, 206, 207, 208, 209, 210, 211, 212, 213, 214, 215, 216, 217, 218, 219, 220, 221, 222, 223, 224, 225, 226, 227, 228, 229, 230, 231, 232, 233, 234, 235, 236, 237, 238, 239, 240, 241, 242, 243, 244, 245, 246, 247, 248, 249, 250, 251, 252, 253, 254, 255, 256, 257, 258, 259, 260, 261, 262, 263, 264, 265, 266, 267, 268, 269, 270, 271, 272, 273, 274, 275, 276, 277, 278, 279, 280, 281, 282, 283, 284, 285, 286, 287, 288, 289, 290, 291, 292, 293, 294, 295, 296, 297, 298, 299, 300, 301, 312, or 313, a variant, derivative, orthologue, paralogue or homologue thereof, in which:

[1138] the amino acid at Mutated site 4 is Phe, and the amino acid at Mutated site 5 is Ser.

[1139] In another preferred embodiment, the mutated PPO comprises a sequence of SEQ ID NO: 1, 2, 3, 4, 5, 6, 7, 8, 9, 10, 11, 12, 13, 14, 15, 16, 17, 18, 19, 20, 21, 22, 23, 24, 25, 26, 27, 28, 29, 30, 31, 32, 33, 34, 35, 36, 37, 38, 39, 40, 41, 42, 43, 44, 45, 46, 47, 48, 49, 50, 51, 52, 53, 54, 55, 56, 57, 58, 59, 60, 61, 62, 63, 64, 65, 66, 67, 68, 69, 70, 71, 72, 73, 74, 75, 76, 77, 78, 79, 80, 81, 82, 83, 84, 85, 86, 87, 88, 89, 90, 91, 92, 93, 94, 95, 96, 97, 98, 99, 100, 101, 102, 103, 104, 105, 106, 107, 108, 109, 110, 111, 112, 113, 114, 115, 116, 117, 118, 119, 120, 121, 122, 123, 124, 125, 126, 127, 128, 129, 130, 131, 132, 133, 134, 135, 136, 137, 138, 139, 140, 141, 142, 143, 144, 145, 146, 147, 148, 149, 150, 151, 152, 153, 154, 155, 156, 157, 158, 159, 160, 161, 162, 163, 164, 165, 166, 167, 168, 169, 170, 171, 172, 173, 174, 175, 176, 177, 178, 179, 180, 181, 182, 183, 184, 185, 186, 187, 188, 189, 190, 191, 192, 193, 194, 195, 196, 197, 198, 199, 200, 201, 202, 203, 204, 205, 206, 207, 208, 209, 210, 211, 212, 213, 214, 215, 216, 217, 218, 219, 220, 221, 222, 223, 224, 225, 226, 227, 228, 229, 230, 231, 232, 233, 234, 235, 236, 237, 238, 239, 240, 241, 242, 243, 244, 245, 246, 247, 248, 249, 250, 251, 252, 253, 254, 255, 256, 257, 258, 259, 260, 261, 262, 263, 264, 265, 266, 267, 268, 269, 270, 271, 272, 273, 274, 275, 276, 277, 278, 279, 280, 281, 282, 283, 284, 285, 286, 287, 288, 289, 290, 291, 292, 293, 294, 295, 296, 297, 298, 299, 300, 301, 312, or 313, a variant, derivative, orthologue, paralogue or homologue thereof, in which:

[1140] the amino acid at Mutated site 4 is Phe, and the amino acid at Mutated site 5 is Thr.

[1141] In another preferred embodiment, the mutated PPO comprises a sequence of SEQ ID NO: 1, 2, 3, 4, 5, 6, 7, 8, 9, 10, 11, 12, 13, 14, 15, 16, 17, 18, 19, 20, 21, 22, 23, 24, 25, 26, 27, 28, 29, 30, 31, 32, 33, 34, 35, 36, 37, 38, 39, 40, 41, 42, 43, 44, 45, 46, 47, 48, 49, 50, 51, 52, 53, 54, 55, 56, 57, 58, 59, 60, 61, 62, 63, 64, 65, 66, 67, 68, 69, 70, 71, 72, 73, 74, 75, 76, 77, 78, 79, 80, 81, 82, 83, 84, 85, 86, 87, 88, 89, 90, 91, 92, 93, 94, 95, 96, 97, 98, 99, 100, 101, 102, 103, 104, 105, 106, 107, 108, 109, 110, 111, 112, 113, 114, 115, 116, 117, 118, 119, 120, 121, 122, 123, 124, 125, 126, 127, 128, 129, 130, 131, 132, 133, 134, 135, 136, 137, 138, 139, 140, 141, 142, 143, 144, 145, 146, 147, 148, 149, 150, 151, 152, 153, 154, 155, 156, 157, 158, 159, 160, 161, 162, 163, 164, 165, 166, 167, 168, 169, 170, 171, 172, 173, 174, 175, 176, 177, 178, 179, 180, 181, 182, 183, 184, 185, 186, 187, 188, 189, 190, 191, 192, 193, 194, 195, 196, 197, 198, 199, 200, 201, 202, 203, 204, 205, 206, 207, 208, 209, 210, 211, 212, 213, 214, 215, 216, 217, 218, 219, 220, 221, 222, 223, 224, 225, 226, 227, 228, 229, 230, 231, 232, 233, 234, 235, 236, 237, 238, 239, 240, 241, 242, 243, 244, 245, 246, 247, 248, 249, 250, 251, 252, 253, 254, 255, 256, 257, 258, 259, 260, 261, 262, 263, 264, 265, 266, 267, 268, 269, 270, 271, 272, 273, 274, 275, 276, 277, 278, 279, 280, 281, 282, 283, 284, 285, 286, 287, 288, 289, 290, 291, 292, 293, 294, 295, 296, 297, 298, 299, 300, 301, 312, or 313, a variant, derivative, orthologue, paralogue or homologue thereof, in which:

[1142] the amino acid at Mutated site 4 is Phe, and the amino acid at Mutated site 5 is Asn.

[1143] In another preferred embodiment, the mutated PPO comprises a sequence of SEQ ID NO: 1, 2, 3, 4, 5, 6, 7, 8, 9, 10, 11, 12, 13, 14, 15, 16, 17, 18, 19, 20, 21, 22, 23, 24, 25, 26, 27, 28, 29, 30, 31, 32, 33, 34, 35, 36, 37, 38, 39, 40, 41, 42, 43, 44, 45, 46, 47, 48, 49, 50, 51, 52, 53, 54, 55, 56, 57, 58, 59, 60, 61, 62, 63, 64, 65, 66, 67, 68, 69, 70, 71, 72, 73, 74, 75, 76, 77, 78, 79, 80, 81, 82, 83, 84, 85, 86, 87, 88, 89, 90, 91, 92, 93, 94, 95, 96, 97, 98, 99, 100, 101, 102, 103, 104, 105, 106, 107, 108, 109, 110, 111, 112, 113, 114, 115, 116, 117, 118, 119, 120, 121, 122, 123, 124, 125, 126, 127, 128, 129, 130, 131, 132, 133, 134, 135, 136, 137, 138, 139, 140, 141, 142, 143, 144, 145, 146, 147, 148, 149, 150, 151, 152, 153, 154, 155, 156, 157, 158, 159, 160, 161, 162, 163, 164, 165, 166, 167, 168, 169, 170, 171, 172, 173, 174, 175, 176, 177, 178, 179, 180, 181, 182, 183, 184, 185, 186, 187, 188, 189, 190, 191, 192, 193, 194, 195, 196, 197, 198, 199, 200, 201, 202, 203, 204, 205, 206, 207, 208, 209, 210, 211, 212, 213, 214, 215, 216, 217, 218, 219, 220, 221, 222, 223, 224, 225, 226, 227, 228, 229, 230, 231, 232, 233, 234, 235, 236, 237, 238, 239, 240, 241, 242, 243, 244, 245, 246, 247, 248, 249, 250, 251, 252, 253, 254, 255, 256, 257, 258, 259, 260, 261, 262, 263, 264, 265, 266, 267, 268, 269, 270, 271, 272, 273, 274, 275, 276, 277, 278, 279, 280, 281, 282, 283, 284, 285, 286, 287, 288, 289, 290, 291, 292, 293, 294, 295, 296, 297, 298, 299, 300, 301, 312, or 313, a variant, derivative, orthologue, paralogue or homologue thereof, in which:

[1144] the amino acid at Mutated site 4 is Phe, and the amino acid at Mutated site 5 is Gln.

[1145] In another preferred embodiment, the mutated PPO comprises a sequence of SEQ ID NO: 1, 2, 3, 4, 5, 6, 7, 8, 9, 10, 11, 12, 13, 14, 15, 16, 17, 18, 19, 20, 21, 22, 23, 24, 25, 26, 27, 28, 29, 30, 31, 32, 33, 34, 35, 36, 37, 38, 39, 40, 41, 42, 43, 44, 45, 46, 47, 48, 49, 50, 51, 52, 53, 54, 55, 56, 57, 58, 59, 60, 61, 62, 63, 64, 65, 66, 67, 68, 69, 70, 71, 72, 73, 74, 75, 76, 77, 78, 79, 80, 81, 82, 83, 84, 85, 86, 87, 88, 89, 90, 91, 92, 93, 94, 95, 96, 97, 98, 99, 100, 101, 102, 103, 104, 105, 106, 107, 108, 109, 110, 111, 112, 113, 114, 115, 116, 117, 118, 119, 120, 121, 122, 123, 124, 125, 126, 127, 128, 129, 130, 131, 132, 133, 134, 135, 136, 137, 138, 139, 140, 141, 142, 143, 144, 145, 146, 147, 148, 149, 150, 151, 152, 153, 154, 155, 156, 157, 158, 159, 160, 161, 162, 163, 164, 165, 166, 167, 168, 169, 170, 171, 172, 173, 174, 175, 176, 177, 178, 179, 180, 181, 182, 183, 184, 185, 186, 187, 188, 189, 190, 191, 192, 193, 194, 195, 196, 197, 198, 199, 200, 201, 202, 203, 204, 205, 206, 207, 208, 209, 210, 211, 212, 213, 214, 215, 216, 217, 218, 219, 220, 221, 222, 223, 224, 225, 226, 227, 228, 229, 230, 231, 232, 233, 234, 235, 236, 237, 238, 239, 240, 241, 242, 243, 244, 245, 246, 247, 248, 249, 250, 251, 252, 253, 254, 255, 256, 257, 258, 259, 260, 261, 262, 263, 264, 265, 266, 267, 268, 269, 270, 271, 272, 273, 274, 275, 276, 277, 278, 279, 280, 281, 282, 283, 284, 285, 286, 287, 288, 289, 290, 291, 292, 293, 294, 295, 296, 297, 298, 299, 300, 301, 312, or 313, a variant, derivative, orthologue, paralogue or homologue thereof, in which:

[1146] the amino acid at Mutated site 4 is Phe, and the amino acid at Mutated site 5 is Cys.

[1147] In another preferred embodiment, the mutated PPO comprises a sequence of SEQ ID NO: 1, 2, 3, 4, 5, 6, 7, 8, 9, 10, 11, 12, 13, 14, 15, 16, 17, 18, 19, 20, 21, 22, 23, 24, 25, 26, 27, 28, 29, 30, 31, 32, 33, 34, 35, 36, 37, 38, 39, 40, 41, 42, 43, 44, 45, 46, 47, 48, 49, 50, 51, 52, 53, 54, 55, 56, 57, 58, 59, 60, 61, 62, 63, 64, 65, 66, 67, 68, 69, 70, 71, 72, 73, 74, 75, 76, 77, 78, 79, 80, 81, 82, 83, 84, 85, 86, 87, 88, 89, 90, 91, 92, 93, 94, 95, 96, 97, 98, 99, 100, 101, 102, 103, 104, 105, 106, 107, 108, 109, 110, 111, 112, 113, 114, 115, 116, 117, 118, 119, 120, 121, 122, 123, 124, 125, 126, 127, 128, 129, 130, 131, 132, 133, 134, 135, 136, 137, 138, 139, 140, 141, 142, 143, 144, 145, 146, 147, 148, 149, 150, 151, 152, 153, 154, 155, 156, 157, 158, 159, 160, 161, 162, 163, 164, 165, 166, 167, 168, 169, 170, 171, 172, 173, 174, 175, 176, 177, 178, 179, 180, 181, 182, 183, 184, 185, 186, 187, 188, 189, 190, 191, 192, 193, 194, 195, 196, 197, 198, 199, 200, 201, 202, 203, 204, 205, 206, 207, 208, 209, 210, 211, 212, 213, 214, 215, 216, 217, 218, 219, 220, 221, 222, 223, 224, 225, 226, 227, 228, 229, 230, 231, 232, 233, 234, 235, 236, 237, 238, 239, 240, 241, 242, 243, 244, 245, 246, 247, 248, 249, 250, 251, 252, 253, 254, 255, 256, 257, 258, 259, 260, 261, 262, 263, 264, 265, 266, 267, 268, 269, 270, 271, 272, 273, 274, 275, 276, 277, 278, 279, 280, 281, 282, 283, 284, 285, 286, 287, 288, 289, 290, 291, 292, 293, 294, 295, 296, 297, 298, 299, 300, 301, 312, or 313, a variant, derivative, orthologue, paralogue or homologue thereof, in which:

[1148] the amino acid at Mutated site 4 is Phe, and the amino acid at Mutated site 5 is Gly.

[1149] In another preferred embodiment, the mutated PPO comprises a sequence of SEQ ID NO: 1, 2, 3, 4, 5, 6, 7, 8, 9, 10, 11, 12, 13, 14, 15, 16, 17, 18, 19, 20, 21, 22, 23, 24, 25, 26, 27, 28, 29, 30, 31, 32, 33, 34, 35, 36, 37, 38, 39, 40, 41, 42, 43, 44, 45, 46, 47, 48, 49, 50, 51, 52, 53, 54, 55, 56, 57, 58, 59, 60, 61, 62, 63, 64, 65, 66, 67, 68, 69, 70, 71, 72, 73, 74, 75, 76, 77, 78, 79, 80, 81, 82, 83, 84, 85, 86, 87, 88, 89, 90, 91, 92, 93, 94, 95, 96, 97, 98, 99, 100, 101, 102, 103, 104, 105, 106, 107, 108, 109, 110, 111, 112, 113, 114, 115, 116, 117, 118, 119, 120, 121, 122, 123, 124, 125, 126, 127, 128, 129, 130, 131, 132, 133, 134, 135, 136, 137, 138, 139, 140, 141, 142, 143, 144, 145, 146, 147, 148, 149, 150, 151, 152, 153, 154, 155, 156, 157, 158, 159, 160, 161, 162, 163, 164, 165, 166, 167, 168, 169, 170, 171, 172, 173, 174, 175, 176, 177, 178, 179, 180, 181, 182, 183, 184, 185, 186, 187, 188, 189, 190, 191, 192, 193, 194, 195, 196, 197, 198, 199, 200, 201, 202, 203, 204, 205, 206, 207, 208, 209, 210, 211, 212, 213, 214, 215, 216, 217, 218, 219, 220, 221, 222, 223, 224, 225, 226, 227, 228, 229, 230, 231, 232, 233, 234, 235, 236, 237, 238, 239, 240, 241, 242, 243, 244, 245, 246, 247, 248, 249, 250, 251, 252, 253, 254, 255, 256, 257, 258, 259, 260, 261, 262, 263, 264, 265, 266, 267, 268, 269, 270, 271, 272, 273, 274, 275, 276, 277, 278, 279, 280, 281, 282, 283, 284, 285, 286, 287, 288, 289, 290, 291, 292, 293, 294, 295, 296, 297, 298, 299, 300, 301, 312, or 313, a variant, derivative, orthologue, paralogue or homologue thereof, in which:

[1150] the amino acid at Mutated site 4 is Phe, and the amino acid at Mutated site 5 is Pro.

[1151] In another preferred embodiment, the mutated PPO comprises a sequence of SEQ ID NO: 1, 2, 3, 4, 5, 6, 7, 8, 9, 10, 11, 12, 13, 14, 15, 16, 17, 18, 19, 20, 21, 22, 23, 24, 25, 26, 27, 28, 29, 30, 31, 32, 33, 34, 35, 36, 37, 38, 39, 40, 41, 42, 43, 44, 45, 46, 47, 48, 49, 50, 51, 52, 53, 54, 55, 56, 57, 58, 59, 60, 61, 62, 63, 64, 65, 66, 67, 68, 69, 70, 71, 72, 73, 74, 75, 76, 77, 78, 79, 80, 81, 82, 83, 84, 85, 86, 87, 88, 89, 90, 91, 92, 93, 94, 95, 96, 97, 98, 99, 100, 101, 102, 103, 104, 105, 106, 107, 108, 109, 110, 111, 112, 113, 114, 115, 116, 117, 118, 119, 120, 121, 122, 123, 124, 125, 126, 127, 128, 129, 130, 131, 132, 133, 134, 135, 136, 137, 138, 139, 140, 141, 142, 143, 144, 145, 146, 147, 148, 149, 150, 151, 152, 153, 154, 155, 156, 157, 158, 159, 160, 161, 162, 163, 164, 165, 166, 167, 168, 169, 170, 171, 172, 173, 174, 175, 176, 177, 178, 179, 180, 181, 182, 183, 184, 185, 186, 187, 188, 189, 190, 191, 192, 193, 194, 195, 196, 197, 198, 199, 200, 201, 202, 203, 204, 205, 206, 207, 208, 209, 210, 211, 212, 213, 214, 215, 216, 217, 218, 219, 220, 221, 222, 223, 224, 225, 226, 227, 228, 229, 230, 231, 232, 233, 234, 235, 236, 237, 238, 239, 240, 241, 242, 243, 244, 245, 246, 247, 248, 249, 250, 251, 252, 253, 254, 255, 256, 257, 258, 259, 260, 261, 262, 263, 264, 265, 266, 267, 268, 269, 270, 271, 272, 273, 274, 275, 276, 277, 278, 279, 280, 281, 282, 283, 284, 285, 286, 287, 288, 289, 290, 291, 292, 293, 294, 295, 296, 297, 298, 299, 300, 301, 312, or 313, a variant, derivative, orthologue, paralogue or homologue thereof, in which:

[1152] the amino acid at Mutated site 4 is Phe, and the amino acid at Mutated site 5 is Arg.

[1153] In another preferred embodiment, the mutated PPO comprises a sequence of SEQ ID NO: 1, 2, 3, 4, 5, 6, 7, 8, 9, 10, 11, 12, 13, 14, 15, 16, 17, 18, 19, 20, 21, 22, 23, 24, 25, 26, 27, 28, 29, 30, 31, 32, 33, 34, 35, 36, 37, 38, 39, 40, 41, 42, 43, 44, 45, 46, 47, 48, 49, 50, 51, 52, 53, 54, 55, 56, 57, 58, 59, 60, 61, 62, 63, 64, 65, 66, 67, 68, 69, 70, 71, 72, 73, 74, 75, 76, 77, 78, 79, 80, 81, 82, 83, 84, 85, 86, 87, 88, 89, 90, 91, 92, 93, 94, 95, 96, 97, 98, 99, 100, 101, 102, 103, 104, 105, 106, 107, 108, 109, 110, 111, 112, 113, 114, 115, 116, 117, 118, 119, 120, 121, 122, 123, 124, 125, 126, 127, 128, 129, 130, 131, 132, 133, 134, 135, 136, 137, 138, 139, 140, 141, 142, 143, 144, 145, 146, 147, 148, 149, 150, 151, 152, 153, 154, 155, 156, 157, 158, 159, 160, 161, 162, 163, 164, 165, 166, 167, 168, 169, 170, 171, 172, 173, 174, 175, 176, 177, 178, 179, 180, 181, 182, 183, 184, 185, 186, 187, 188, 189, 190, 191, 192, 193, 194, 195, 196, 197, 198, 199, 200, 201, 202, 203, 204, 205, 206, 207, 208, 209, 210, 211, 212, 213, 214, 215, 216, 217, 218, 219, 220, 221, 222, 223, 224, 225, 226, 227, 228, 229, 230, 231, 232, 233, 234, 235, 236, 237, 238, 239, 240, 241, 242, 243, 244, 245, 246, 247, 248, 249, 250, 251, 252, 253, 254, 255, 256, 257, 258, 259, 260, 261, 262, 263, 264, 265, 266, 267, 268, 269, 270, 271, 272, 273, 274, 275, 276, 277, 278, 279, 280, 281, 282, 283, 284, 285, 286, 287, 288, 289, 290, 291, 292, 293, 294, 295, 296, 297, 298, 299, 300, 301, 312, or 313, a variant, derivative, orthologue, paralogue or homologue thereof, in which:

[1154] the amino acid at Mutated site 4 is Phe, and the amino acid at Mutated site 5 is Tyr.

[1155] In another preferred embodiment, the mutated PPO comprises a sequence of SEQ ID NO: 1, 2, 3, 4, 5, 6, 7, 8, 9, 10, 11, 12, 13, 14, 15, 16, 17, 18, 19, 20, 21, 22, 23, 24, 25, 26, 27, 28, 29, 30, 31, 32, 33, 34, 35, 36, 37, 38, 39, 40, 41, 42, 43, 44, 45, 46, 47, 48, 49, 50, 51, 52, 53, 54, 55, 56, 57, 58, 59, 60, 61, 62, 63, 64, 65, 66, 67, 68, 69, 70, 71, 72, 73, 74, 75, 76, 77, 78, 79, 80, 81, 82, 83, 84, 85, 86, 87, 88, 89, 90, 91, 92, 93, 94, 95, 96, 97, 98, 99, 100, 101, 102, 103, 104, 105, 106, 107, 108, 109, 110, 111, 112, 113, 114, 115, 116, 117, 118, 119, 120, 121, 122, 123, 124, 125, 126, 127, 128, 129, 130, 131, 132, 133, 134, 135, 136, 137, 138, 139, 140, 141, 142, 143, 144, 145, 146, 147, 148, 149, 150, 151, 152, 153, 154, 155, 156, 157, 158, 159, 160, 161, 162, 163, 164, 165, 166, 167, 168, 169, 170, 171, 172, 173, 174, 175, 176, 177, 178, 179, 180, 181, 182, 183, 184, 185, 186, 187, 188, 189, 190, 191, 192, 193, 194, 195, 196, 197, 198, 199, 200, 201, 202, 203, 204, 205, 206, 207, 208, 209, 210, 211, 212, 213, 214, 215, 216, 217, 218, 219, 220, 221, 222, 223, 224, 225, 226, 227, 228, 229, 230, 231, 232, 233, 234, 235, 236, 237, 238, 239, 240, 241, 242, 243, 244, 245, 246, 247, 248, 249, 250, 251, 252, 253, 254, 255, 256, 257, 258, 259, 260, 261, 262, 263, 264, 265, 266, 267, 268, 269, 270, 271, 272, 273, 274, 275, 276, 277, 278, 279, 280, 281, 282, 283, 284, 285, 286, 287, 288, 289, 290, 291, 292, 293, 294, 295, 296, 297, 298, 299, 300, 301, 312, or 313, a variant, derivative, orthologue, paralogue or homologue thereof, in which:

[1156] the amino acid at Mutated site 4 is Phe, and the amino acid at Mutated site 5 is Trp.

[1157] In another preferred embodiment, the mutated PPO comprises a sequence of SEQ ID NO: 1, 2, 3, 4, 5, 6, 7, 8, 9, 10, 11, 12, 13, 14, 15, 16, 17, 18, 19, 20, 21, 22, 23, 24, 25, 26, 27, 28, 29, 30, 31, 32, 33, 34, 35, 36, 37, 38, 39, 40, 41, 42, 43, 44, 45, 46, 47, 48, 49, 50, 51, 52, 53, 54, 55, 56, 57, 58, 59, 60, 61, 62, 63, 64, 65, 66, 67, 68, 69, 70, 71, 72, 73, 74, 75, 76, 77, 78, 79, 80, 81, 82, 83, 84, 85, 86, 87, 88, 89, 90, 91, 92, 93, 94, 95, 96, 97, 98, 99, 100, 101, 102, 103, 104, 105, 106, 107, 108, 109, 110, 111, 112, 113, 114, 115, 116, 117, 118, 119, 120, 121, 122, 123, 124, 125, 126, 127, 128, 129, 130, 131, 132, 133, 134, 135, 136, 137, 138, 139, 140, 141, 142, 143, 144, 145, 146, 147, 148, 149, 150, 151, 152, 153, 154, 155, 156, 157, 158, 159, 160, 161, 162, 163, 164, 165, 166, 167, 168, 169, 170, 171, 172, 173, 174, 175, 176, 177, 178, 179, 180, 181, 182, 183, 184, 185, 186, 187, 188, 189, 190, 191, 192, 193, 194, 195, 196, 197, 198, 199, 200, 201, 202, 203, 204, 205, 206, 207, 208, 209, 210, 211, 212, 213, 214, 215, 216, 217, 218, 219, 220, 221, 222, 223, 224, 225, 226, 227, 228, 229, 230, 231, 232, 233, 234, 235, 236, 237, 238, 239, 240, 241, 242, 243, 244, 245, 246, 247, 248, 249, 250, 251, 252, 253, 254, 255, 256, 257, 258, 259, 260, 261, 262, 263, 264, 265, 266, 267, 268, 269, 270, 271, 272, 273, 274, 275, 276, 277, 278, 279, 280, 281, 282, 283, 284, 285, 286, 287, 288, 289, 290, 291, 292, 293, 294, 295, 296, 297, 298, 299, 300, 301, 312, or 313, a variant, derivative, orthologue, paralogue or homologue thereof, in which:

[1158] the amino acid at Mutated site 4 is Tyr, and the amino acid at Mutated site 5 is Ala.

[1159] In another preferred embodiment, the mutated PPO comprises a sequence of SEQ ID NO: 1, 2, 3, 4, 5, 6, 7, 8, 9, 10, 11, 12, 13, 14, 15, 16, 17, 18, 19, 20, 21, 22, 23, 24, 25, 26, 27, 28, 29, 30, 31, 32, 33, 34, 35, 36, 37, 38, 39, 40, 41, 42, 43, 44, 45, 46, 47, 48, 49, 50, 51, 52, 53, 54, 55, 56, 57, 58, 59, 60, 61, 62, 63, 64, 65, 66, 67, 68, 69, 70, 71, 72, 73, 74, 75, 76, 77, 78, 79, 80, 81, 82, 83, 84, 85, 86, 87, 88, 89, 90, 91, 92, 93, 94, 95, 96, 97, 98, 99, 100, 101, 102, 103, 104, 105, 106, 107, 108, 109, 110, 111, 112, 113, 114, 115, 116, 117, 118, 119, 120, 121, 122, 123, 124, 125, 126, 127, 128, 129, 130, 131, 132, 133, 134, 135, 136, 137, 138, 139, 140, 141, 142, 143, 144, 145, 146, 147, 148, 149, 150, 151, 152, 153, 154, 155, 156, 157, 158, 159, 160, 161, 162, 163, 164, 165, 166, 167, 168, 169, 170, 171, 172, 173, 174, 175, 176, 177, 178, 179, 180, 181, 182, 183, 184, 185, 186, 187, 188, 189, 190, 191, 192, 193, 194, 195, 196, 197, 198, 199, 200, 201, 202, 203, 204, 205, 206, 207, 208, 209, 210, 211, 212, 213, 214, 215, 216, 217, 218, 219, 220, 221, 222, 223, 224, 225, 226, 227, 228, 229, 230, 231, 232, 233, 234, 235, 236, 237, 238, 239, 240, 241, 242, 243, 244, 245, 246, 247, 248, 249, 250, 251, 252, 253, 254, 255, 256, 257, 258, 259, 260, 261, 262, 263, 264, 265, 266, 267, 268, 269, 270, 271, 272, 273, 274, 275, 276, 277, 278, 279, 280, 281, 282, 283, 284, 285, 286, 287, 288, 289, 290, 291, 292, 293, 294, 295, 296, 297, 298, 299, 300, 301, 312, or 313, a variant, derivative, orthologue, paralogue or homologue thereof, in which:

[1160] the amino acid at Mutated site 4 is Tyr, and the amino acid at Mutated site 5 is Leu.

[1161] In another preferred embodiment, the mutated PPO comprises a sequence of SEQ ID NO: 1, 2, 3, 4, 5, 6, 7, 8, 9, 10, 11, 12, 13, 14, 15, 16, 17, 18, 19, 20, 21, 22, 23, 24, 25, 26, 27, 28, 29, 30, 31, 32, 33, 34, 35, 36, 37, 38, 39, 40, 41, 42, 43, 44, 45, 46, 47, 48, 49, 50, 51, 52, 53, 54, 55, 56, 57, 58, 59, 60, 61, 62, 63, 64, 65, 66, 67, 68, 69, 70, 71, 72, 73, 74, 75, 76, 77, 78, 79, 80, 81, 82, 83, 84, 85, 86, 87, 88, 89, 90, 91, 92, 93, 94, 95, 96, 97, 98, 99, 100, 101, 102, 103, 104, 105, 106, 107, 108, 109, 110, 111, 112, 113, 114, 115, 116, 117, 118, 119, 120, 121, 122, 123, 124, 125, 126, 127, 128, 129, 130, 131, 132, 133, 134, 135, 136, 137, 138, 139, 140, 141, 142, 143, 144, 145, 146, 147, 148, 149, 150, 151, 152, 153, 154, 155, 156, 157, 158, 159, 160, 161, 162, 163, 164, 165, 166, 167, 168, 169, 170, 171, 172, 173, 174, 175, 176, 177, 178, 179, 180, 181, 182, 183, 184, 185, 186, 187, 188, 189, 190, 191, 192, 193, 194, 195, 196, 197, 198, 199, 200, 201, 202, 203, 204, 205, 206, 207, 208, 209, 210, 211, 212, 213, 214, 215, 216, 217, 218, 219, 220, 221, 222, 223, 224, 225, 226, 227, 228, 229, 230, 231, 232, 233, 234, 235, 236, 237, 238, 239, 240, 241, 242, 243, 244, 245, 246, 247, 248, 249, 250, 251, 252, 253, 254, 255, 256, 257, 258, 259, 260, 261, 262, 263, 264, 265, 266, 267, 268, 269, 270, 271, 272, 273, 274, 275, 276, 277, 278, 279, 280, 281, 282, 283, 284, 285, 286, 287, 288, 289, 290, 291, 292, 293, 294, 295, 296, 297, 298, 299, 300, 301, 312, or 313, a variant, derivative, orthologue, paralogue or homologue thereof, in which:

[1162] the amino acid at Mutated site 4 is Tyr, and the amino acid at Mutated site 5 is Val.

[1163] In another preferred embodiment, the mutated PPO comprises a sequence of SEQ ID NO: 1, 2, 3, 4, 5, 6, 7, 8, 9, 10, 11, 12, 13, 14, 15, 16, 17, 18, 19, 20, 21, 22, 23, 24, 25, 26, 27, 28, 29, 30, 31, 32, 33, 34, 35, 36, 37, 38, 39, 40, 41, 42, 43, 44, 45, 46, 47, 48, 49, 50, 51, 52, 53, 54, 55, 56, 57, 58, 59, 60, 61, 62, 63, 64, 65, 66, 67, 68, 69, 70, 71, 72, 73, 74, 75, 76, 77, 78, 79, 80, 81, 82, 83, 84, 85, 86, 87, 88, 89, 90, 91, 92, 93, 94, 95, 96, 97, 98, 99, 100, 101, 102, 103, 104, 105, 106, 107, 108, 109, 110, 111, 112, 113, 114, 115, 116, 117, 118, 119, 120, 121, 122, 123, 124, 125, 126, 127, 128, 129, 130, 131, 132, 133, 134, 135, 136, 137, 138, 139, 140, 141, 142, 143, 144, 145, 146, 147, 148, 149, 150, 151, 152, 153, 154, 155, 156, 157, 158, 159, 160, 161, 162, 163, 164, 165, 166, 167, 168, 169, 170, 171, 172, 173, 174, 175, 176, 177, 178, 179, 180, 181, 182, 183, 184, 185, 186, 187, 188, 189, 190, 191, 192, 193, 194, 195, 196, 197, 198, 199, 200, 201, 202, 203, 204, 205, 206, 207, 208, 209, 210, 211, 212, 213, 214, 215, 216, 217, 218, 219, 220, 221, 222, 223, 224, 225, 226, 227, 228, 229, 230, 231, 232, 233, 234, 235, 236, 237, 238, 239, 240, 241, 242, 243, 244, 245, 246, 247, 248, 249, 250, 251, 252, 253, 254, 255, 256, 257, 258, 259, 260, 261, 262, 263, 264, 265, 266, 267, 268, 269, 270, 271, 272, 273, 274, 275, 276, 277, 278, 279, 280, 281, 282, 283, 284, 285, 286, 287, 288, 289, 290, 291, 292, 293, 294, 295, 296, 297, 298, 299, 300, 301, 312, or 313, a variant, derivative, orthologue, paralogue or homologue thereof, in which:

[1164] the amino acid at Mutated site 4 is Tyr, and the amino acid at Mutated site 5 is Ile.

[1165] In another preferred embodiment, the mutated PPO comprises a sequence of SEQ ID NO: 1, 2, 3, 4, 5, 6, 7, 8, 9, 10, 11, 12, 13, 14, 15, 16, 17, 18, 19, 20, 21, 22, 23, 24, 25, 26, 27, 28, 29, 30, 31, 32, 33, 34, 35, 36, 37, 38, 39, 40, 41, 42, 43, 44, 45, 46, 47, 48, 49, 50, 51, 52, 53, 54, 55, 56, 57, 58, 59, 60, 61, 62, 63, 64, 65, 66, 67, 68, 69, 70, 71, 72, 73, 74, 75, 76, 77, 78, 79, 80, 81, 82, 83, 84, 85, 86, 87, 88, 89, 90, 91, 92, 93, 94, 95, 96, 97, 98, 99, 100, 101, 102, 103, 104, 105, 106, 107, 108, 109, 110, 111, 112, 113, 114, 115, 116, 117, 118, 119, 120, 121, 122, 123, 124, 125, 126, 127, 128, 129, 130, 131, 132, 133, 134, 135, 136, 137, 138, 139, 140, 141, 142, 143, 144, 145, 146, 147, 148, 149, 150, 151, 152, 153, 154, 155, 156, 157, 158, 159, 160, 161, 162, 163, 164, 165, 166, 167, 168, 169, 170, 171, 172, 173, 174, 175, 176, 177, 178, 179, 180, 181, 182, 183, 184, 185, 186, 187, 188, 189, 190, 191, 192, 193, 194, 195, 196, 197, 198, 199, 200, 201, 202, 203, 204, 205, 206, 207, 208, 209, 210, 211, 212, 213, 214, 215, 216, 217, 218, 219, 220, 221, 222, 223, 224, 225, 226, 227, 228, 229, 230, 231, 232, 233, 234, 235, 236, 237, 238, 239, 240, 241, 242, 243, 244, 245, 246, 247, 248, 249, 250, 251, 252, 253, 254, 255, 256, 257, 258, 259, 260, 261, 262, 263, 264, 265, 266, 267, 268, 269, 270, 271, 272, 273, 274, 275, 276, 277, 278, 279, 280, 281, 282, 283, 284, 285, 286, 287, 288, 289, 290, 291, 292, 293, 294, 295, 296, 297, 298, 299, 300, 301, 312, or 313, a variant, derivative, orthologue, paralogue or homologue thereof, in which:

[1166] the amino acid at Mutated site 4 is Tyr, and the amino acid at Mutated site 5 is Met.

[1167] In another preferred embodiment, the mutated PPO comprises a sequence of SEQ ID NO: 1, 2, 3, 4, 5, 6, 7, 8, 9, 10, 11, 12, 13, 14, 15, 16, 17, 18, 19, 20, 21, 22, 23, 24, 25, 26, 27, 28, 29, 30, 31, 32, 33, 34, 35, 36, 37, 38, 39, 40, 41, 42, 43, 44, 45, 46, 47, 48, 49, 50, 51, 52, 53, 54, 55, 56, 57, 58, 59, 60, 61, 62, 63, 64, 65, 66, 67, 68, 69, 70, 71, 72, 73, 74, 75, 76, 77, 78, 79, 80, 81, 82, 83, 84, 85, 86, 87, 88, 89, 90, 91, 92, 93, 94, 95, 96, 97, 98, 99, 100, 101, 102, 103, 104, 105, 106, 107, 108, 109, 110, 111, 112, 113, 114, 115, 116, 117, 118, 119, 120, 121, 122, 123, 124, 125, 126, 127, 128, 129, 130, 131, 132, 133, 134, 135, 136, 137, 138, 139, 140, 141, 142, 143, 144, 145, 146, 147, 148, 149, 150, 151, 152, 153, 154, 155, 156, 157, 158, 159, 160, 161, 162, 163, 164, 165, 166, 167, 168, 169, 170, 171, 172, 173, 174, 175, 176, 177, 178, 179, 180, 181, 182, 183, 184, 185, 186, 187, 188, 189, 190, 191, 192, 193, 194, 195, 196, 197, 198, 199, 200, 201, 202, 203, 204, 205, 206, 207, 208, 209, 210, 211, 212, 213, 214, 215, 216, 217, 218, 219, 220, 221, 222, 223, 224, 225, 226, 227, 228, 229, 230, 231, 232, 233, 234, 235, 236, 237, 238, 239, 240, 241, 242, 243, 244, 245, 246, 247, 248, 249, 250, 251, 252, 253, 254, 255, 256, 257, 258, 259, 260, 261, 262, 263, 264, 265, 266, 267, 268, 269, 270, 271, 272, 273, 274, 275, 276, 277, 278, 279, 280, 281, 282, 283, 284, 285, 286, 287, 288, 289, 290, 291, 292, 293, 294, 295, 296, 297, 298, 299, 300, 301, 312, or 313, a variant, derivative, orthologue, paralogue or homologue thereof, in which:

[1168] the amino acid at Mutated site 4 is Tyr, and the amino acid at Mutated site 5 is His.

[1169] In another preferred embodiment, the mutated PPO comprises a sequence of SEQ ID NO: 1, 2, 3, 4, 5, 6, 7, 8, 9, 10, 11, 12, 13, 14, 15, 16, 17, 18, 19, 20, 21, 22, 23, 24, 25, 26, 27, 28, 29, 30, 31, 32, 33, 34, 35, 36, 37, 38, 39, 40, 41, 42, 43, 44, 45, 46, 47, 48, 49, 50, 51, 52, 53, 54, 55, 56, 57, 58, 59, 60, 61, 62, 63, 64, 65, 66, 67, 68, 69, 70, 71, 72, 73, 74, 75, 76, 77, 78, 79, 80, 81, 82, 83, 84, 85, 86, 87, 88, 89, 90, 91, 92, 93, 94, 95, 96, 97, 98, 99, 100, 101, 102, 103, 104, 105, 106, 107, 108, 109, 110, 111, 112, 113, 114, 115, 116, 117, 118, 119, 120, 121, 122, 123, 124, 125, 126, 127, 128, 129, 130, 131, 132, 133, 134, 135, 136, 137, 138, 139, 140, 141, 142, 143, 144, 145, 146, 147, 148, 149, 150, 151, 152, 153, 154, 155, 156, 157, 158, 159, 160, 161, 162, 163, 164, 165, 166, 167, 168, 169, 170, 171, 172, 173, 174, 175, 176, 177, 178, 179, 180, 181, 182, 183, 184, 185, 186, 187, 188, 189, 190, 191, 192, 193, 194, 195, 196, 197, 198, 199, 200, 201, 202, 203, 204, 205, 206, 207, 208, 209, 210, 211, 212, 213, 214, 215, 216, 217, 218, 219, 220, 221, 222, 223, 224, 225, 226, 227, 228, 229, 230, 231, 232, 233, 234, 235, 236, 237, 238, 239, 240, 241, 242, 243, 244, 245, 246, 247, 248, 249, 250, 251, 252, 253, 254, 255, 256, 257, 258, 259, 260, 261, 262, 263, 264, 265, 266, 267, 268, 269, 270, 271, 272, 273, 274, 275, 276, 277, 278, 279, 280, 281, 282, 283, 284, 285, 286, 287, 288, 289, 290, 291, 292, 293, 294, 295, 296, 297, 298, 299, 300, 301, 312, or 313, a variant, derivative, orthologue, paralogue or homologue thereof, in which:

[1170] the amino acid at Mutated site 4 is Tyr, and the amino acid at Mutated site 5 is Lys.

[1171] In another preferred embodiment, the mutated PPO comprises a sequence of SEQ ID NO: 1, 2, 3, 4, 5, 6, 7, 8, 9, 10, 11, 12, 13, 14, 15, 16, 17, 18, 19, 20, 21, 22, 23, 24, 25, 26, 27, 28, 29, 30, 31, 32, 33, 34, 35, 36, 37, 38, 39, 40, 41, 42, 43, 44, 45, 46, 47, 48, 49, 50, 51, 52, 53, 54, 55, 56, 57, 58, 59, 60, 61, 62, 63, 64, 65, 66, 67, 68, 69, 70, 71, 72, 73, 74, 75, 76, 77, 78, 79, 80, 81, 82, 83, 84, 85, 86, 87, 88, 89, 90, 91, 92, 93, 94, 95, 96, 97, 98, 99, 100, 101, 102, 103, 104, 105, 106, 107, 108, 109, 110, 111, 112, 113, 114, 115, 116, 117, 118, 119, 120, 121, 122, 123, 124, 125, 126, 127, 128, 129, 130, 131, 132, 133, 134, 135, 136, 137, 138, 139, 140, 141, 142, 143, 144, 145, 146, 147, 148, 149, 150, 151, 152, 153, 154, 155, 156, 157, 158, 159, 160, 161, 162, 163, 164, 165, 166, 167, 168, 169, 170, 171, 172, 173, 174, 175, 176, 177, 178, 179, 180, 181, 182, 183, 184, 185, 186, 187, 188, 189, 190, 191, 192, 193, 194, 195, 196, 197, 198, 199, 200, 201, 202, 203, 204, 205, 206, 207, 208, 209, 210, 211, 212, 213, 214, 215, 216, 217, 218, 219, 220, 221, 222, 223, 224, 225, 226, 227, 228, 229, 230, 231, 232, 233, 234, 235, 236, 237, 238, 239, 240, 241, 242, 243, 244, 245, 246, 247, 248, 249, 250, 251, 252, 253, 254, 255, 256, 257, 258, 259, 260, 261, 262, 263, 264, 265, 266, 267, 268, 269, 270, 271, 272, 273, 274, 275, 276, 277, 278, 279, 280, 281, 282, 283, 284, 285, 286, 287, 288, 289, 290, 291, 292, 293, 294, 295, 296, 297, 298, 299, 300, 301, 312, or 313, a variant, derivative, orthologue, paralogue or homologue thereof, in which:

[1172] the amino acid at Mutated site 4 is Tyr, and the amino acid at Mutated site 5 is Asp.

[1173] In another preferred embodiment, the mutated PPO comprises a sequence of SEQ ID NO: 1, 2, 3, 4, 5, 6, 7, 8, 9, 10, 11, 12, 13, 14, 15, 16, 17, 18, 19, 20, 21, 22, 23, 24, 25, 26, 27, 28, 29, 30, 31, 32, 33, 34, 35, 36, 37, 38, 39, 40, 41, 42, 43, 44, 45, 46, 47, 48, 49, 50, 51, 52, 53, 54, 55, 56, 57, 58, 59, 60, 61, 62, 63, 64, 65, 66, 67, 68, 69, 70, 71, 72, 73, 74, 75, 76, 77, 78, 79, 80, 81, 82, 83, 84, 85, 86, 87, 88, 89, 90, 91, 92, 93, 94, 95, 96, 97, 98, 99, 100, 101, 102, 103, 104, 105, 106, 107, 108, 109, 110, 111, 112, 113, 114, 115, 116, 117, 118, 119, 120, 121, 122, 123, 124, 125, 126, 127, 128, 129, 130, 131, 132, 133, 134, 135, 136, 137, 138, 139, 140, 141, 142, 143, 144, 145, 146, 147, 148, 149, 150, 151, 152, 153, 154, 155, 156, 157, 158, 159, 160, 161, 162, 163, 164, 165, 166, 167, 168, 169, 170, 171, 172, 173, 174, 175, 176, 177, 178, 179, 180, 181, 182, 183, 184, 185, 186, 187, 188, 189, 190, 191, 192, 193, 194, 195, 196, 197, 198, 199, 200, 201, 202, 203, 204, 205, 206, 207, 208, 209, 210, 211, 212, 213, 214, 215, 216, 217, 218, 219, 220, 221, 222, 223, 224, 225, 226, 227, 228, 229, 230, 231, 232, 233, 234, 235, 236, 237, 238, 239, 240, 241, 242, 243, 244, 245, 246, 247, 248, 249, 250, 251, 252, 253, 254, 255, 256, 257, 258, 259, 260, 261, 262, 263, 264, 265, 266, 267, 268, 269, 270, 271, 272, 273, 274, 275, 276, 277, 278, 279, 280, 281, 282, 283, 284, 285, 286, 287, 288, 289, 290, 291, 292, 293, 294, 295, 296, 297, 298, 299, 300, 301, 312, or 313, a variant, derivative, orthologue, paralogue or homologue thereof, in which:

[1174] the amino acid at Mutated site 4 is Tyr, and the amino acid at Mutated site 5 is Glu.

[1175] In another preferred embodiment, the mutated PPO comprises a sequence of SEQ ID NO: 1, 2, 3, 4, 5, 6, 7, 8, 9, 10, 11, 12, 13, 14, 15, 16, 17, 18, 19, 20, 21, 22, 23, 24, 25, 26, 27, 28, 29, 30, 31, 32, 33, 34, 35, 36, 37, 38, 39, 40, 41, 42, 43, 44, 45, 46, 47, 48, 49, 50, 51, 52, 53, 54, 55, 56, 57, 58, 59, 60, 61, 62, 63, 64, 65, 66, 67, 68, 69, 70, 71, 72, 73, 74, 75, 76, 77, 78, 79, 80, 81, 82, 83, 84, 85, 86, 87, 88, 89, 90, 91, 92, 93, 94, 95, 96, 97, 98, 99, 100, 101, 102, 103, 104, 105, 106, 107, 108, 109, 110, 111, 112, 113, 114, 115, 116, 117, 118, 119, 120, 121, 122, 123, 124, 125, 126, 127, 128, 129, 130, 131, 132, 133, 134, 135, 136, 137, 138, 139, 140, 141, 142, 143, 144, 145, 146, 147, 148, 149, 150, 151, 152, 153, 154, 155, 156, 157, 158, 159, 160, 161, 162, 163, 164, 165, 166, 167, 168, 169, 170, 171, 172, 173, 174, 175, 176, 177, 178, 179, 180, 181, 182, 183, 184, 185, 186, 187, 188, 189, 190, 191, 192, 193, 194, 195, 196, 197, 198, 199, 200, 201, 202, 203, 204, 205, 206, 207, 208, 209, 210, 211, 212, 213, 214, 215, 216, 217, 218, 219, 220, 221, 222, 223, 224, 225, 226, 227, 228, 229, 230, 231, 232, 233, 234, 235, 236, 237, 238, 239, 240, 241, 242, 243, 244, 245, 246, 247, 248, 249, 250, 251, 252, 253, 254, 255, 256, 257, 258, 259, 260, 261, 262, 263, 264, 265, 266, 267, 268, 269, 270, 271, 272, 273, 274, 275, 276, 277, 278, 279, 280, 281, 282, 283, 284, 285, 286, 287, 288, 289, 290, 291, 292, 293, 294, 295, 296, 297, 298, 299, 300, 301, 312, or 313, a variant, derivative, orthologue, paralogue or homologue thereof, in which:

[1176] the amino acid at Mutated site 4 is Tyr, and the amino acid at Mutated site 5 is Ser.

[1177] In another preferred embodiment, the mutated PPO comprises a sequence of SEQ ID NO: 1, 2, 3, 4, 5, 6, 7, 8, 9, 10, 11, 12, 13, 14, 15, 16, 17, 18, 19, 20, 21, 22, 23, 24, 25, 26, 27, 28, 29, 30, 31, 32, 33, 34, 35, 36, 37, 38, 39, 40, 41, 42, 43, 44, 45, 46, 47, 48, 49, 50, 51, 52, 53, 54, 55, 56, 57, 58, 59, 60, 61, 62, 63, 64, 65, 66, 67, 68, 69, 70, 71, 72, 73, 74, 75, 76, 77, 78, 79, 80, 81, 82, 83, 84, 85, 86, 87, 88, 89, 90, 91, 92, 93, 94, 95, 96, 97, 98, 99, 100, 101, 102, 103, 104, 105, 106, 107, 108, 109, 110, 111, 112, 113, 114, 115, 116, 117, 118, 119, 120, 121, 122, 123, 124, 125, 126, 127, 128, 129, 130, 131, 132, 133, 134, 135, 136, 137, 138, 139, 140, 141, 142, 143, 144, 145, 146, 147, 148, 149, 150, 151, 152, 153, 154, 155, 156, 157, 158, 159, 160, 161, 162, 163, 164, 165, 166, 167, 168, 169, 170, 171, 172, 173, 174, 175, 176, 177, 178, 179, 180, 181, 182, 183, 184, 185, 186, 187, 188, 189, 190, 191, 192, 193, 194, 195, 196, 197, 198, 199, 200, 201, 202, 203, 204, 205, 206, 207, 208, 209, 210, 211, 212, 213, 214, 215, 216, 217, 218, 219, 220, 221, 222, 223, 224, 225, 226, 227, 228, 229, 230, 231, 232, 233, 234, 235, 236, 237, 238, 239, 240, 241, 242, 243, 244, 245, 246, 247, 248, 249, 250, 251, 252, 253, 254, 255, 256, 257, 258, 259, 260, 261, 262, 263, 264, 265, 266, 267, 268, 269, 270, 271, 272, 273, 274, 275, 276, 277, 278, 279, 280, 281, 282, 283, 284, 285, 286, 287, 288, 289, 290, 291, 292, 293, 294, 295, 296, 297, 298, 299, 300, 301, 312, or 313, a variant, derivative, orthologue, paralogue or homologue thereof, in which:

[1178] the amino acid at Mutated site 4 is Tyr, and the amino acid at Mutated site 5 is Thr.

[1179] In another preferred embodiment, the mutated PPO comprises a sequence of SEQ ID NO: 1, 2, 3, 4, 5, 6, 7, 8, 9, 10, 11, 12, 13, 14, 15, 16, 17, 18, 19, 20, 21, 22, 23, 24, 25, 26, 27, 28, 29, 30, 31, 32, 33, 34, 35, 36, 37, 38, 39, 40, 41, 42, 43, 44, 45, 46, 47, 48, 49, 50, 51, 52, 53, 54, 55, 56, 57, 58, 59, 60, 61, 62, 63, 64, 65, 66, 67, 68, 69, 70, 71, 72, 73, 74, 75, 76, 77, 78, 79, 80, 81, 82, 83, 84, 85, 86, 87, 88, 89, 90, 91, 92, 93, 94, 95, 96, 97, 98, 99, 100, 101, 102, 103, 104, 105, 106, 107, 108, 109, 110, 111, 112, 113, 114, 115, 116, 117, 118, 119, 120, 121, 122, 123, 124, 125, 126, 127, 128, 129, 130, 131, 132, 133, 134, 135, 136, 137, 138, 139, 140, 141, 142, 143, 144, 145, 146, 147, 148, 149, 150, 151, 152, 153, 154, 155, 156, 157, 158, 159, 160, 161, 162, 163, 164, 165, 166, 167, 168, 169, 170, 171, 172, 173, 174, 175, 176, 177, 178, 179, 180, 181, 182, 183, 184, 185, 186, 187, 188, 189, 190, 191, 192, 193, 194, 195, 196, 197, 198, 199, 200, 201, 202, 203, 204, 205, 206, 207, 208, 209, 210, 211, 212, 213, 214, 215, 216, 217, 218, 219, 220, 221, 222, 223, 224, 225, 226, 227, 228, 229, 230, 231, 232, 233, 234, 235, 236, 237, 238, 239, 240, 241, 242, 243, 244, 245, 246, 247, 248, 249, 250, 251, 252, 253, 254, 255, 256, 257, 258, 259, 260, 261, 262, 263, 264, 265, 266, 267, 268, 269, 270, 271, 272, 273, 274, 275, 276, 277, 278, 279, 280, 281, 282, 283, 284, 285, 286, 287, 288, 289, 290, 291, 292, 293, 294, 295, 296, 297, 298, 299, 300, 301, 312, or 313, a variant, derivative, orthologue, paralogue or homologue thereof, in which:

[1180] the amino acid at Mutated site 4 is Tyr, and the amino acid at Mutated site 5 is Asn.

[1181] In another preferred embodiment, the mutated PPO comprises a sequence of SEQ ID NO: 1, 2, 3, 4, 5, 6, 7, 8, 9, 10, 11, 12, 13, 14, 15, 16, 17, 18, 19, 20, 21, 22, 23, 24, 25, 26, 27, 28, 29, 30, 31, 32, 33, 34, 35, 36, 37, 38, 39, 40, 41, 42, 43, 44, 45, 46, 47, 48, 49, 50, 51, 52, 53, 54, 55, 56, 57, 58, 59, 60, 61, 62, 63, 64, 65, 66, 67, 68, 69, 70, 71, 72, 73, 74, 75, 76, 77, 78, 79, 80, 81, 82, 83, 84, 85, 86, 87, 88, 89, 90, 91, 92, 93, 94, 95, 96, 97, 98, 99, 100, 101, 102, 103, 104, 105, 106, 107, 108, 109, 110, 111, 112, 113, 114, 115, 116, 117, 118, 119, 120, 121, 122, 123, 124, 125, 126, 127, 128, 129, 130, 131, 132, 133, 134, 135, 136, 137, 138, 139, 140, 141, 142, 143, 144, 145, 146, 147, 148, 149, 150, 151, 152, 153, 154, 155, 156, 157, 158, 159, 160, 161, 162, 163, 164, 165, 166, 167, 168, 169, 170, 171, 172, 173, 174, 175, 176, 177, 178, 179, 180, 181, 182, 183, 184, 185, 186, 187, 188, 189, 190, 191, 192, 193, 194, 195, 196, 197, 198, 199, 200, 201, 202, 203, 204, 205, 206, 207, 208, 209, 210, 211, 212, 213, 214, 215, 216, 217, 218, 219, 220, 221, 222, 223, 224, 225, 226, 227, 228, 229, 230, 231, 232, 233, 234, 235, 236, 237, 238, 239, 240, 241, 242, 243, 244, 245, 246, 247, 248, 249, 250, 251, 252, 253, 254, 255, 256, 257, 258, 259, 260, 261, 262, 263, 264, 265, 266, 267, 268, 269, 270, 271, 272, 273, 274, 275, 276, 277, 278, 279, 280, 281, 282, 283, 284, 285, 286, 287, 288, 289, 290, 291, 292, 293, 294, 295, 296, 297, 298, 299, 300, 301, 312, or 313, a variant, derivative, orthologue, paralogue or homologue thereof, in which:

[1182] the amino acid at Mutated site 4 is Tyr, and the amino acid at Mutated site 5 is Gln.

[1183] In another preferred embodiment, the mutated PPO comprises a sequence of SEQ ID NO: 1, 2, 3, 4, 5, 6, 7, 8, 9, 10, 11, 12, 13, 14, 15, 16, 17, 18, 19, 20, 21, 22, 23, 24, 25, 26, 27, 28, 29, 30, 31, 32, 33, 34, 35, 36, 37, 38, 39, 40, 41, 42, 43, 44, 45, 46, 47, 48, 49, 50, 51, 52, 53, 54, 55, 56, 57, 58, 59, 60, 61, 62, 63, 64, 65, 66, 67, 68, 69, 70, 71, 72, 73, 74, 75, 76, 77, 78, 79, 80, 81, 82, 83, 84, 85, 86, 87, 88, 89, 90, 91, 92, 93, 94, 95, 96, 97, 98, 99, 100, 101, 102, 103, 104, 105, 106, 107, 108, 109, 110, 111, 112, 113, 114, 115, 116, 117, 118, 119, 120, 121, 122, 123, 124, 125, 126, 127, 128, 129, 130, 131, 132, 133, 134, 135, 136, 137, 138, 139, 140, 141, 142, 143, 144, 145, 146, 147, 148, 149, 150, 151, 152, 153, 154, 155, 156, 157, 158, 159, 160, 161, 162, 163, 164, 165, 166, 167, 168, 169, 170, 171, 172, 173, 174, 175, 176, 177, 178, 179, 180, 181, 182, 183, 184, 185, 186, 187, 188, 189, 190, 191, 192, 193, 194, 195, 196, 197, 198, 199, 200, 201, 202, 203, 204, 205, 206, 207, 208, 209, 210, 211, 212, 213, 214, 215, 216, 217, 218, 219, 220, 221, 222, 223, 224, 225, 226, 227, 228, 229, 230, 231, 232, 233, 234, 235, 236, 237, 238, 239, 240, 241, 242, 243, 244, 245, 246, 247, 248, 249, 250, 251, 252, 253, 254, 255, 256, 257, 258, 259, 260, 261, 262, 263, 264, 265, 266, 267, 268, 269, 270, 271, 272, 273, 274, 275, 276, 277, 278, 279, 280, 281, 282, 283, 284, 285, 286, 287, 288, 289, 290, 291, 292, 293, 294, 295, 296, 297, 298, 299, 300, 301, 312, or 313, a variant, derivative, orthologue, paralogue or homologue thereof, in which:

[1184] the amino acid at Mutated site 4 is Tyr, and the amino acid at Mutated site 5 is Cys.

[1185] In another preferred embodiment, the mutated PPO comprises a sequence of SEQ ID NO: 1, 2, 3, 4, 5, 6, 7, 8, 9, 10, 11, 12, 13, 14, 15, 16, 17, 18, 19, 20, 21, 22, 23, 24, 25, 26, 27, 28, 29, 30, 31, 32, 33, 34, 35, 36, 37, 38, 39, 40, 41, 42, 43, 44, 45, 46, 47, 48, 49, 50, 51, 52, 53, 54, 55, 56, 57, 58, 59, 60, 61, 62, 63, 64, 65, 66, 67, 68, 69, 70, 71, 72, 73, 74, 75, 76, 77, 78, 79, 80, 81, 82, 83, 84, 85, 86, 87, 88, 89, 90, 91, 92, 93, 94, 95, 96, 97, 98, 99, 100, 101, 102, 103, 104, 105, 106, 107, 108, 109, 110, 111, 112, 113, 114, 115, 116, 117, 118, 119, 120, 121, 122, 123, 124, 125, 126, 127, 128, 129, 130, 131, 132, 133, 134, 135, 136, 137, 138, 139, 140, 141, 142, 143, 144, 145, 146, 147, 148, 149, 150, 151, 152, 153, 154, 155, 156, 157, 158, 159, 160, 161, 162, 163, 164, 165, 166, 167, 168, 169, 170, 171, 172, 173, 174, 175, 176, 177, 178, 179, 180, 181, 182, 183, 184, 185, 186, 187, 188, 189, 190, 191, 192, 193, 194, 195, 196, 197, 198, 199, 200, 201, 202, 203, 204, 205, 206, 207, 208, 209, 210, 211, 212, 213, 214, 215, 216, 217, 218, 219, 220, 221, 222, 223, 224, 225, 226, 227, 228, 229, 230, 231, 232, 233, 234, 235, 236, 237, 238, 239, 240, 241, 242, 243, 244, 245, 246, 247, 248, 249, 250, 251, 252, 253, 254, 255, 256, 257, 258, 259, 260, 261, 262, 263, 264, 265, 266, 267, 268, 269, 270, 271, 272, 273, 274, 275, 276, 277, 278, 279, 280, 281, 282, 283, 284, 285, 286, 287, 288, 289, 290, 291, 292, 293, 294, 295, 296, 297, 298, 299, 300, 301, 312, or 313, a variant, derivative, orthologue, paralogue or homologue thereof, in which:

[1186] the amino acid at Mutated site 4 is Tyr, and the amino acid at Mutated site 5 is Gly.

[1187] In another preferred embodiment, the mutated PPO comprises a sequence of SEQ ID NO: 1, 2, 3, 4, 5, 6, 7, 8, 9, 10, 11, 12, 13, 14, 15, 16, 17, 18, 19, 20, 21, 22, 23, 24, 25, 26, 27, 28, 29, 30, 31, 32, 33, 34, 35, 36, 37, 38, 39, 40, 41, 42, 43, 44, 45, 46, 47, 48, 49, 50, 51, 52, 53, 54, 55, 56, 57, 58, 59, 60, 61, 62, 63, 64, 65, 66, 67, 68, 69, 70, 71, 72, 73, 74, 75, 76, 77, 78, 79, 80, 81, 82, 83, 84, 85, 86, 87, 88, 89, 90, 91, 92, 93, 94, 95, 96, 97, 98, 99, 100, 101, 102, 103, 104, 105, 106, 107, 108, 109, 110, 111, 112, 113, 114, 115, 116, 117, 118, 119, 120, 121, 122, 123, 124, 125, 126, 127, 128, 129, 130, 131, 132, 133, 134, 135, 136, 137, 138, 139, 140, 141, 142, 143, 144, 145, 146, 147, 148, 149, 150, 151, 152, 153, 154, 155, 156, 157, 158, 159, 160, 161, 162, 163, 164, 165, 166, 167, 168, 169, 170, 171, 172, 173, 174, 175, 176, 177, 178, 179, 180, 181, 182, 183, 184, 185, 186, 187, 188, 189, 190, 191, 192, 193, 194, 195, 196, 197, 198, 199, 200, 201, 202, 203, 204, 205, 206, 207, 208, 209, 210, 211, 212, 213, 214, 215, 216, 217, 218, 219, 220, 221, 222, 223, 224, 225, 226, 227, 228, 229, 230, 231, 232, 233, 234, 235, 236, 237, 238, 239, 240, 241, 242, 243, 244, 245, 246, 247, 248, 249, 250, 251, 252, 253, 254, 255, 256, 257, 258, 259, 260, 261, 262, 263, 264, 265, 266, 267, 268, 269, 270, 271, 272, 273, 274, 275, 276, 277, 278, 279, 280, 281, 282, 283, 284, 285, 286, 287, 288, 289, 290, 291, 292, 293, 294, 295, 296, 297, 298, 299, 300, 301, 312, or 313, a variant, derivative, orthologue, paralogue or homologue thereof, in which:

[1188] the amino acid at Mutated site 4 is Tyr, and the amino acid at Mutated site 5 is Pro.

[1189] In another preferred embodiment, the mutated PPO comprises a sequence of SEQ ID NO: 1, 2, 3, 4, 5, 6, 7, 8, 9, 10, 11, 12, 13, 14, 15, 16, 17, 18, 19, 20, 21, 22, 23, 24, 25, 26, 27, 28, 29, 30, 31, 32, 33, 34, 35, 36, 37, 38, 39, 40, 41, 42, 43, 44, 45, 46, 47, 48, 49, 50, 51, 52, 53, 54, 55, 56, 57, 58, 59, 60, 61, 62, 63, 64, 65, 66, 67, 68, 69, 70, 71, 72, 73, 74, 75, 76, 77, 78, 79, 80, 81, 82, 83, 84, 85, 86, 87, 88, 89, 90, 91, 92, 93, 94, 95, 96, 97, 98, 99, 100, 101, 102, 103, 104, 105, 106, 107, 108, 109, 110, 111, 112, 113, 114, 115, 116, 117, 118, 119, 120, 121, 122, 123, 124, 125, 126, 127, 128, 129, 130, 131, 132, 133, 134, 135, 136, 137, 138, 139, 140, 141, 142, 143, 144, 145, 146, 147, 148, 149, 150, 151, 152, 153, 154, 155, 156, 157, 158, 159, 160, 161, 162, 163, 164, 165, 166, 167, 168, 169, 170, 171, 172, 173, 174, 175, 176, 177, 178, 179, 180, 181, 182, 183, 184, 185, 186, 187, 188, 189, 190, 191, 192, 193, 194, 195, 196, 197, 198, 199, 200, 201, 202, 203, 204, 205, 206, 207, 208, 209, 210, 211, 212, 213, 214, 215, 216, 217, 218, 219, 220, 221, 222, 223, 224, 225, 226, 227, 228, 229, 230, 231, 232, 233, 234, 235, 236, 237, 238, 239, 240, 241, 242, 243, 244, 245, 246, 247, 248, 249, 250, 251, 252, 253, 254, 255, 256, 257, 258, 259, 260, 261, 262, 263, 264, 265, 266, 267, 268, 269, 270, 271, 272, 273, 274, 275, 276, 277, 278, 279, 280, 281, 282, 283, 284, 285, 286, 287, 288, 289, 290, 291, 292, 293, 294, 295, 296, 297, 298, 299, 300, 301, 312, or 313, a variant, derivative, orthologue, paralogue or homologue thereof, in which:

[1190] the amino acid at Mutated site 4 is Tyr, and the amino acid at Mutated site 5 is Arg.

[1191] In another preferred embodiment, the mutated PPO comprises a sequence of SEQ ID NO: 1, 2, 3, 4, 5, 6, 7, 8, 9, 10, 11, 12, 13, 14, 15, 16, 17, 18, 19, 20, 21, 22, 23, 24, 25, 26, 27, 28, 29, 30, 31, 32, 33, 34, 35, 36, 37, 38, 39, 40, 41, 42, 43, 44, 45, 46, 47, 48, 49, 50, 51, 52, 53, 54, 55, 56, 57, 58, 59, 60, 61, 62, 63, 64, 65, 66, 67, 68, 69, 70, 71, 72, 73, 74, 75, 76, 77, 78, 79, 80, 81, 82, 83, 84, 85, 86, 87, 88, 89, 90, 91, 92, 93, 94, 95, 96, 97, 98, 99, 100, 101, 102, 103, 104, 105, 106, 107, 108, 109, 110, 111, 112, 113, 114, 115, 116, 117, 118, 119, 120, 121, 122, 123, 124, 125, 126, 127, 128, 129, 130, 131, 132, 133, 134, 135, 136, 137, 138, 139, 140, 141, 142, 143, 144, 145, 146, 147, 148, 149, 150, 151, 152, 153, 154, 155, 156, 157, 158, 159, 160, 161, 162, 163, 164, 165, 166, 167, 168, 169, 170, 171, 172, 173, 174, 175, 176, 177, 178, 179, 180, 181, 182, 183, 184, 185, 186, 187, 188, 189, 190, 191, 192, 193, 194, 195, 196, 197, 198, 199, 200, 201, 202, 203, 204, 205, 206, 207, 208, 209, 210, 211, 212, 213, 214, 215, 216, 217, 218, 219, 220, 221, 222, 223, 224, 225, 226, 227, 228, 229, 230, 231, 232, 233, 234, 235, 236, 237, 238, 239, 240, 241, 242, 243, 244, 245, 246, 247, 248, 249, 250, 251, 252, 253, 254, 255, 256, 257, 258, 259, 260, 261, 262, 263, 264, 265, 266, 267, 268, 269, 270, 271, 272, 273, 274, 275, 276, 277, 278, 279, 280, 281, 282, 283, 284, 285, 286, 287, 288, 289, 290, 291, 292, 293, 294, 295, 296, 297, 298, 299, 300, 301, 312, or 313, a variant, derivative, orthologue, paralogue or homologue thereof, in which:

[1192] the amino acid at Mutated site 4 is Tyr, and the amino acid at Mutated site 5 is Tyr.

[1193] In another preferred embodiment, the mutated PPO comprises a sequence of SEQ ID NO: 1, 2, 3, 4, 5, 6, 7, 8, 9, 10, 11, 12, 13, 14, 15, 16, 17, 18, 19, 20, 21, 22, 23, 24, 25, 26, 27, 28, 29, 30, 31, 32, 33, 34, 35, 36, 37, 38, 39, 40, 41, 42, 43, 44, 45, 46, 47, 48, 49, 50, 51, 52, 53, 54, 55, 56, 57, 58, 59, 60, 61, 62, 63, 64, 65, 66, 67, 68, 69, 70, 71, 72, 73, 74, 75, 76, 77, 78, 79, 80, 81, 82, 83, 84, 85, 86, 87, 88, 89, 90, 91, 92, 93, 94, 95, 96, 97, 98, 99, 100, 101, 102, 103, 104, 105, 106, 107, 108, 109, 110, 111, 112, 113, 114, 115, 116, 117, 118, 119, 120, 121, 122, 123, 124, 125, 126, 127, 128, 129, 130, 131, 132, 133, 134, 135, 136, 137, 138, 139, 140, 141, 142, 143, 144, 145, 146, 147, 148, 149, 150, 151, 152, 153, 154, 155, 156, 157, 158, 159, 160, 161, 162, 163, 164, 165, 166, 167, 168, 169, 170, 171, 172, 173, 174, 175, 176, 177, 178, 179, 180, 181, 182, 183, 184, 185, 186, 187, 188, 189, 190, 191, 192, 193, 194, 195, 196, 197, 198, 199, 200, 201, 202, 203, 204, 205, 206, 207, 208, 209, 210, 211, 212, 213, 214, 215, 216, 217, 218, 219, 220, 221, 222, 223, 224, 225, 226, 227, 228, 229, 230, 231, 232, 233, 234, 235, 236, 237, 238, 239, 240, 241, 242, 243, 244, 245, 246, 247, 248, 249, 250, 251, 252, 253, 254, 255, 256, 257, 258, 259, 260, 261, 262, 263, 264, 265, 266, 267, 268, 269, 270, 271, 272, 273, 274, 275, 276, 277, 278, 279, 280, 281, 282, 283, 284, 285, 286, 287, 288, 289, 290, 291, 292, 293, 294, 295, 296, 297, 298, 299, 300, 301, 312, or 313, a variant, derivative, orthologue, paralogue or homologue thereof, in which:

[1194] the amino acid at Mutated site 4 is Tyr, and the amino acid at Mutated site 5 is Trp.

[1195] In another preferred embodiment, the mutated PPO comprises a sequence of SEQ ID NO: 1, 2, 3, 4, 5, 6, 7, 8, 9, 10, 11, 12, 13, 14, 15, 16, 17, 18, 19, 20, 21, 22, 23, 24, 25, 26, 27, 28, 29, 30, 31, 32, 33, 34, 35, 36, 37, 38, 39, 40, 41, 42, 43, 44, 45, 46, 47, 48, 49, 50, 51, 52, 53, 54, 55, 56, 57, 58, 59, 60, 61, 62, 63, 64, 65, 66, 67, 68, 69, 70, 71, 72, 73, 74, 75, 76, 77, 78, 79, 80, 81, 82, 83, 84, 85, 86, 87, 88, 89, 90, 91, 92, 93, 94, 95, 96, 97, 98, 99, 100, 101, 102, 103, 104, 105, 106, 107, 108, 109, 110, 111, 112, 113, 114, 115, 116, 117, 118, 119, 120, 121, 122, 123, 124, 125, 126, 127, 128, 129, 130, 131, 132, 133, 134, 135, 136, 137, 138, 139, 140, 141, 142, 143, 144, 145, 146, 147, 148, 149, 150, 151, 152, 153, 154, 155, 156, 157, 158, 159, 160, 161, 162, 163, 164, 165, 166, 167, 168, 169, 170, 171, 172, 173, 174, 175, 176, 177, 178, 179, 180, 181, 182, 183, 184, 185, 186, 187, 188, 189, 190, 191, 192, 193, 194, 195, 196, 197, 198, 199, 200, 201, 202, 203, 204, 205, 206, 207, 208, 209, 210, 211, 212, 213, 214, 215, 216, 217, 218, 219, 220, 221, 222, 223, 224, 225, 226, 227, 228, 229, 230, 231, 232, 233, 234, 235, 236, 237, 238, 239, 240, 241, 242, 243, 244, 245, 246, 247, 248, 249, 250, 251, 252, 253, 254, 255, 256, 257, 258, 259, 260, 261, 262, 263, 264, 265, 266, 267, 268, 269, 270, 271, 272, 273, 274, 275, 276, 277, 278, 279, 280, 281, 282, 283, 284, 285, 286, 287, 288, 289, 290, 291, 292, 293, 294, 295, 296, 297, 298, 299, 300, 301, 312, or 313, a variant, derivative, orthologue, paralogue or homologue thereof, in which:

[1196] the amino acid at Mutated site 4 is Trp, and the amino acid at Mutated site 5 is Ala.

[1197] In another preferred embodiment, the mutated PPO comprises a sequence of SEQ ID NO: 1, 2, 3, 4, 5, 6, 7, 8, 9, 10, 11, 12, 13, 14, 15, 16, 17, 18, 19, 20, 21, 22, 23, 24, 25, 26, 27, 28, 29, 30, 31, 32, 33, 34, 35, 36, 37, 38, 39, 40, 41, 42, 43, 44, 45, 46, 47, 48, 49, 50, 51, 52, 53, 54, 55, 56, 57, 58, 59, 60, 61, 62, 63, 64, 65, 66, 67, 68, 69, 70, 71, 72, 73, 74, 75, 76, 77, 78, 79, 80, 81, 82, 83, 84, 85, 86, 87, 88, 89, 90, 91, 92, 93, 94, 95, 96, 97, 98, 99, 100, 101, 102, 103, 104, 105, 106, 107, 108, 109, 110, 111, 112, 113, 114, 115, 116, 117, 118, 119, 120, 121, 122, 123, 124, 125, 126, 127, 128, 129, 130, 131, 132, 133, 134, 135, 136, 137, 138, 139, 140, 141, 142, 143, 144, 145, 146, 147, 148, 149, 150, 151, 152, 153, 154, 155, 156, 157, 158, 159, 160, 161, 162, 163, 164, 165, 166, 167, 168, 169, 170, 171, 172, 173, 174, 175, 176, 177, 178, 179, 180, 181, 182, 183, 184, 185, 186, 187, 188, 189, 190, 191, 192, 193, 194, 195, 196, 197, 198, 199, 200, 201, 202, 203, 204, 205, 206, 207, 208, 209, 210, 211, 212, 213, 214, 215, 216, 217, 218, 219, 220, 221, 222, 223, 224, 225, 226, 227, 228, 229, 230, 231, 232, 233, 234, 235, 236, 237, 238, 239, 240, 241, 242, 243, 244, 245, 246, 247, 248, 249, 250, 251, 252, 253, 254, 255, 256, 257, 258, 259, 260, 261, 262, 263, 264, 265, 266, 267, 268, 269, 270, 271, 272, 273, 274, 275, 276, 277, 278, 279, 280, 281, 282, 283, 284, 285, 286, 287, 288, 289, 290, 291, 292, 293, 294, 295, 296, 297, 298, 299, 300, 301, 312, or 313, a variant, derivative, orthologue, paralogue or homologue thereof, in which:

[1198] the amino acid at Mutated site 4 is Trp, and the amino acid at Mutated site 5 is Leu.

[1199] In another preferred embodiment, the mutated PPO comprises a sequence of SEQ ID NO: 1, 2, 3, 4, 5, 6, 7, 8, 9, 10, 11, 12, 13, 14, 15, 16, 17, 18, 19, 20, 21, 22, 23, 24, 25, 26, 27, 28, 29, 30, 31, 32, 33, 34, 35, 36, 37, 38, 39, 40, 41, 42, 43, 44, 45, 46, 47, 48, 49, 50, 51, 52, 53, 54, 55, 56, 57, 58, 59, 60, 61, 62, 63, 64, 65, 66, 67, 68, 69, 70, 71, 72, 73, 74, 75, 76, 77, 78, 79, 80, 81, 82, 83, 84, 85, 86, 87, 88, 89, 90, 91, 92, 93, 94, 95, 96, 97, 98, 99, 100, 101, 102, 103, 104, 105, 106, 107, 108, 109, 110, 111, 112, 113, 114, 115, 116, 117, 118, 119, 120, 121, 122, 123, 124, 125, 126, 127, 128, 129, 130, 131, 132, 133, 134, 135, 136, 137, 138, 139, 140, 141, 142, 143, 144, 145, 146, 147, 148, 149, 150, 151, 152, 153, 154, 155, 156, 157, 158, 159, 160, 161, 162, 163, 164, 165, 166, 167, 168, 169, 170, 171, 172, 173, 174, 175, 176, 177, 178, 179, 180, 181, 182, 183, 184, 185, 186, 187, 188, 189, 190, 191, 192, 193, 194, 195, 196, 197, 198, 199, 200, 201, 202, 203, 204, 205, 206, 207, 208, 209, 210, 211, 212, 213, 214, 215, 216, 217, 218, 219, 220, 221, 222, 223, 224, 225, 226, 227, 228, 229, 230, 231, 232, 233, 234, 235, 236, 237, 238, 239, 240, 241, 242, 243, 244, 245, 246, 247, 248, 249, 250, 251, 252, 253, 254, 255, 256, 257, 258, 259, 260, 261, 262, 263, 264, 265, 266, 267, 268, 269, 270, 271, 272, 273, 274, 275, 276, 277, 278, 279, 280, 281, 282, 283, 284, 285, 286, 287, 288, 289, 290, 291, 292, 293, 294, 295, 296, 297, 298, 299, 300, 301, 312, or 313, a variant, derivative, orthologue, paralogue or homologue thereof, in which:

[1200] the amino acid at Mutated site 4 is Trp, and the amino acid at Mutated site 5 is Val.

[1201] In another preferred embodiment, the mutated PPO comprises a sequence of SEQ ID NO: 1, 2, 3, 4, 5, 6, 7, 8, 9, 10, 11, 12, 13, 14, 15, 16, 17, 18, 19, 20, 21, 22, 23, 24, 25, 26, 27, 28, 29, 30, 31, 32, 33, 34, 35, 36, 37, 38, 39, 40, 41, 42, 43, 44, 45, 46, 47, 48, 49, 50, 51, 52, 53, 54, 55, 56, 57, 58, 59, 60, 61, 62, 63, 64, 65, 66, 67, 68, 69, 70, 71, 72, 73, 74, 75, 76, 77, 78, 79, 80, 81, 82, 83, 84, 85, 86, 87, 88, 89, 90, 91, 92, 93, 94, 95, 96, 97, 98, 99, 100, 101, 102, 103, 104, 105, 106, 107, 108, 109, 110, 111, 112, 113, 114, 115, 116, 117, 118, 119, 120, 121, 122, 123, 124, 125, 126, 127, 128, 129, 130, 131, 132, 133, 134, 135, 136, 137, 138, 139, 140, 141, 142, 143, 144, 145, 146, 147, 148, 149, 150, 151, 152, 153, 154, 155, 156, 157, 158, 159, 160, 161, 162, 163, 164, 165, 166, 167, 168, 169, 170, 171, 172, 173, 174, 175, 176, 177, 178, 179, 180, 181, 182, 183, 184, 185, 186, 187, 188, 189, 190, 191, 192, 193, 194, 195, 196, 197, 198, 199, 200, 201, 202, 203, 204, 205, 206, 207, 208, 209, 210, 211, 212, 213, 214, 215, 216, 217, 218, 219, 220, 221, 222, 223, 224, 225, 226, 227, 228, 229, 230, 231, 232, 233, 234, 235, 236, 237, 238, 239, 240, 241, 242, 243, 244, 245, 246, 247, 248, 249, 250, 251, 252, 253, 254, 255, 256, 257, 258, 259, 260, 261, 262, 263, 264, 265, 266, 267, 268, 269, 270, 271, 272, 273, 274, 275, 276, 277, 278, 279, 280, 281, 282, 283, 284, 285, 286, 287, 288, 289, 290, 291, 292, 293, 294, 295, 296, 297, 298, 299, 300, 301, 312, or 313, a variant, derivative, orthologue, paralogue or homologue thereof, in which:

[1202] the amino acid at Mutated site 4 is Trp, and the amino acid at Mutated site 5 is Ile.

[1203] In another preferred embodiment, the mutated PPO comprises a sequence of SEQ ID NO: 1, 2, 3, 4, 5, 6, 7, 8, 9, 10, 11, 12, 13, 14, 15, 16, 17, 18, 19, 20, 21, 22, 23, 24, 25, 26, 27, 28, 29, 30, 31, 32, 33, 34, 35, 36, 37, 38, 39, 40, 41, 42, 43, 44, 45, 46, 47, 48, 49, 50, 51, 52, 53, 54, 55, 56, 57, 58, 59, 60, 61, 62, 63, 64, 65, 66, 67, 68, 69, 70, 71, 72, 73, 74, 75, 76, 77, 78, 79, 80, 81, 82, 83, 84, 85, 86, 87, 88, 89, 90, 91, 92, 93, 94, 95, 96, 97, 98, 99, 100, 101, 102, 103, 104, 105, 106, 107, 108, 109, 110, 111, 112, 113, 114, 115, 116, 117, 118, 119, 120, 121, 122, 123, 124, 125, 126, 127, 128, 129, 130, 131, 132, 133, 134, 135, 136, 137, 138, 139, 140, 141, 142, 143, 144, 145, 146, 147, 148, 149, 150, 151, 152, 153, 154, 155, 156, 157, 158, 159, 160, 161, 162, 163, 164, 165, 166, 167, 168, 169, 170, 171, 172, 173, 174, 175, 176, 177, 178, 179, 180, 181, 182, 183, 184, 185, 186, 187, 188, 189, 190, 191, 192, 193, 194, 195, 196, 197, 198, 199, 200, 201, 202, 203, 204, 205, 206, 207, 208, 209, 210, 211, 212, 213, 214, 215, 216, 217, 218, 219, 220, 221, 222, 223, 224, 225, 226, 227, 228, 229, 230, 231, 232, 233, 234, 235, 236, 237, 238, 239, 240, 241, 242, 243, 244, 245, 246, 247, 248, 249, 250, 251, 252, 253, 254, 255, 256, 257, 258, 259, 260, 261, 262, 263, 264, 265, 266, 267, 268, 269, 270, 271, 272, 273, 274, 275, 276, 277, 278, 279, 280, 281, 282, 283, 284, 285, 286, 287, 288, 289, 290, 291, 292, 293, 294, 295, 296, 297, 298, 299, 300, 301, 312, or 313, a variant, derivative, orthologue, paralogue or homologue thereof, in which:

[1204] the amino acid at Mutated site 4 is Trp, and the amino acid at Mutated site 5 is Met.

[1205] In another preferred embodiment, the mutated PPO comprises a sequence of SEQ ID NO: 1, 2, 3, 4, 5, 6, 7, 8, 9, 10, 11, 12, 13, 14, 15, 16, 17, 18, 19, 20, 21, 22, 23, 24, 25, 26, 27, 28, 29, 30, 31, 32, 33, 34, 35, 36, 37, 38, 39, 40, 41, 42, 43, 44, 45, 46, 47, 48, 49, 50, 51, 52, 53, 54, 55, 56, 57, 58, 59, 60, 61, 62, 63, 64, 65, 66, 67, 68, 69, 70, 71, 72, 73, 74, 75, 76, 77, 78, 79, 80, 81, 82, 83, 84, 85, 86, 87, 88, 89, 90, 91, 92, 93, 94, 95, 96, 97, 98, 99, 100, 101, 102, 103, 104, 105, 106, 107, 108, 109, 110, 111, 112, 113, 114, 115, 116, 117, 118, 119, 120, 121, 122, 123, 124, 125, 126, 127, 128, 129, 130, 131, 132, 133, 134, 135, 136, 137, 138, 139, 140, 141, 142, 143, 144, 145, 146, 147, 148, 149, 150, 151, 152, 153, 154, 155, 156, 157, 158, 159, 160, 161, 162, 163, 164, 165, 166, 167, 168, 169, 170, 171, 172, 173, 174, 175, 176, 177, 178, 179, 180, 181, 182, 183, 184, 185, 186, 187, 188, 189, 190, 191, 192, 193, 194, 195, 196, 197, 198, 199, 200, 201, 202, 203, 204, 205, 206, 207, 208, 209, 210, 211, 212, 213, 214, 215, 216, 217, 218, 219, 220, 221, 222, 223, 224, 225, 226, 227, 228, 229, 230, 231, 232, 233, 234, 235, 236, 237, 238, 239, 240, 241, 242, 243, 244, 245, 246, 247, 248, 249, 250, 251, 252, 253, 254, 255, 256, 257, 258, 259, 260, 261, 262, 263, 264, 265, 266, 267, 268, 269, 270, 271, 272, 273, 274, 275, 276, 277, 278, 279, 280, 281, 282, 283, 284, 285, 286, 287, 288, 289, 290, 291, 292, 293, 294, 295, 296, 297, 298, 299, 300, 301, 312, or 313, a variant, derivative, orthologue, paralogue or homologue thereof, in which:

[1206] the amino acid at Mutated site 4 is Trp, and the amino acid at Mutated site 5 is His.

[1207] In another preferred embodiment, the mutated PPO comprises a sequence of SEQ ID NO: 1, 2, 3, 4, 5, 6, 7, 8, 9, 10, 11, 12, 13, 14, 15, 16, 17, 18, 19, 20, 21, 22, 23, 24, 25, 26, 27, 28, 29, 30, 31, 32, 33, 34, 35, 36, 37, 38, 39, 40, 41, 42, 43, 44, 45, 46, 47, 48, 49, 50, 51, 52, 53, 54, 55, 56, 57, 58, 59, 60, 61, 62, 63, 64, 65, 66, 67, 68, 69, 70, 71, 72, 73, 74, 75, 76, 77, 78, 79, 80, 81, 82, 83, 84, 85, 86, 87, 88, 89, 90, 91, 92, 93, 94, 95, 96, 97, 98, 99, 100, 101, 102, 103, 104, 105, 106, 107, 108, 109, 110, 111, 112, 113, 114, 115, 116, 117, 118, 119, 120, 121, 122, 123, 124, 125, 126, 127, 128, 129, 130, 131, 132, 133, 134, 135, 136, 137, 138, 139, 140, 141, 142, 143, 144, 145, 146, 147, 148, 149, 150, 151, 152, 153, 154, 155, 156, 157, 158, 159, 160, 161, 162, 163, 164, 165, 166, 167, 168, 169, 170, 171, 172, 173, 174, 175, 176, 177, 178, 179, 180, 181, 182, 183, 184, 185, 186, 187, 188, 189, 190, 191, 192, 193, 194, 195, 196, 197, 198, 199, 200, 201, 202, 203, 204, 205, 206, 207, 208, 209, 210, 211, 212, 213, 214, 215, 216, 217, 218, 219, 220, 221, 222, 223, 224, 225, 226, 227, 228, 229, 230, 231, 232, 233, 234, 235, 236, 237, 238, 239, 240, 241, 242, 243, 244, 245, 246, 247, 248, 249, 250, 251, 252, 253, 254, 255, 256, 257, 258, 259, 260, 261, 262, 263, 264, 265, 266, 267, 268, 269, 270, 271, 272, 273, 274, 275, 276, 277, 278, 279, 280, 281, 282, 283, 284, 285, 286, 287, 288, 289, 290, 291, 292, 293, 294, 295, 296, 297, 298, 299, 300, 301, 312, or 313, a variant, derivative, orthologue, paralogue or homologue thereof, in which:

[1208] the amino acid at Mutated site 4 is Trp, and the amino acid at Mutated site 5 is Lys.

[1209] In another preferred embodiment, the mutated PPO comprises a sequence of SEQ ID NO: 1, 2, 3, 4, 5, 6, 7, 8, 9, 10, 11, 12, 13, 14, 15, 16, 17, 18, 19, 20, 21, 22, 23, 24, 25, 26, 27, 28, 29, 30, 31, 32, 33, 34, 35, 36, 37, 38, 39, 40, 41, 42, 43, 44, 45, 46, 47, 48, 49, 50, 51, 52, 53, 54, 55, 56, 57, 58, 59, 60, 61, 62, 63, 64, 65, 66, 67, 68, 69, 70, 71, 72, 73, 74, 75, 76, 77, 78, 79, 80, 81, 82, 83, 84, 85, 86, 87, 88, 89, 90, 91, 92, 93, 94, 95, 96, 97, 98, 99, 100, 101, 102, 103, 104, 105, 106, 107, 108, 109, 110, 111, 112, 113, 114, 115, 116, 117, 118, 119, 120, 121, 122, 123, 124, 125, 126, 127, 128, 129, 130, 131, 132, 133, 134, 135, 136, 137, 138, 139, 140, 141, 142, 143, 144, 145, 146, 147, 148, 149, 150, 151, 152, 153, 154, 155, 156, 157, 158, 159, 160, 161, 162, 163, 164, 165, 166, 167, 168, 169, 170, 171, 172, 173, 174, 175, 176, 177, 178, 179, 180, 181, 182, 183, 184, 185, 186, 187, 188, 189, 190, 191, 192, 193, 194, 195, 196, 197, 198, 199, 200, 201, 202, 203, 204, 205, 206, 207, 208, 209, 210, 211, 212, 213, 214, 215, 216, 217, 218, 219, 220, 221, 222, 223, 224, 225, 226, 227, 228, 229, 230, 231, 232, 233, 234, 235, 236, 237, 238, 239, 240, 241, 242, 243, 244, 245, 246, 247, 248, 249, 250, 251, 252, 253, 254, 255, 256, 257, 258, 259, 260, 261, 262, 263, 264, 265, 266, 267, 268, 269, 270, 271, 272, 273, 274, 275, 276, 277, 278, 279, 280, 281, 282, 283, 284, 285, 286, 287, 288, 289, 290, 291, 292, 293, 294, 295, 296, 297, 298, 299, 300, 301, 312, or 313, a variant, derivative, orthologue, paralogue or homologue thereof, in which:

[1210] the amino acid at Mutated site 4 is Trp, and the amino acid at Mutated site 5 is Asp.

[1211] In another preferred embodiment, the mutated PPO comprises a sequence of SEQ ID NO: 1, 2, 3, 4, 5, 6, 7, 8, 9, 10, 11, 12, 13, 14, 15, 16, 17, 18, 19, 20, 21, 22, 23, 24, 25, 26, 27, 28, 29, 30, 31, 32, 33, 34, 35, 36, 37, 38, 39, 40, 41, 42, 43, 44, 45, 46, 47, 48, 49, 50, 51, 52, 53, 54, 55, 56, 57, 58, 59, 60, 61, 62, 63, 64, 65, 66, 67, 68, 69, 70, 71, 72, 73, 74, 75, 76, 77, 78, 79, 80, 81, 82, 83, 84, 85, 86, 87, 88, 89, 90, 91, 92, 93, 94, 95, 96, 97, 98, 99, 100, 101, 102, 103, 104, 105, 106, 107, 108, 109, 110, 111, 112, 113, 114, 115, 116, 117, 118, 119, 120, 121, 122, 123, 124, 125, 126, 127, 128, 129, 130, 131, 132, 133, 134, 135, 136, 137, 138, 139, 140, 141, 142, 143, 144, 145, 146, 147, 148, 149, 150, 151, 152, 153, 154, 155, 156, 157, 158, 159, 160, 161, 162, 163, 164, 165, 166, 167, 168, 169, 170, 171, 172, 173, 174, 175, 176, 177, 178, 179, 180, 181, 182, 183, 184, 185, 186, 187, 188, 189, 190, 191, 192, 193, 194, 195, 196, 197, 198, 199, 200, 201, 202, 203, 204, 205, 206, 207, 208, 209, 210, 211, 212, 213, 214, 215, 216, 217, 218, 219, 220, 221, 222, 223, 224, 225, 226, 227, 228, 229, 230, 231, 232, 233, 234, 235, 236, 237, 238, 239, 240, 241, 242, 243, 244, 245, 246, 247, 248, 249, 250, 251, 252, 253, 254, 255, 256, 257, 258, 259, 260, 261, 262, 263, 264, 265, 266, 267, 268, 269, 270, 271, 272, 273, 274, 275, 276, 277, 278, 279, 280, 281, 282, 283, 284, 285, 286, 287, 288, 289, 290, 291, 292, 293, 294, 295, 296, 297, 298, 299, 300, 301, 312, or 313, a variant, derivative, orthologue, paralogue or homologue thereof, in which:

[1212] the amino acid at Mutated site 4 is Trp, and the amino acid at Mutated site 5 is Glu.

[1213] In another preferred embodiment, the mutated PPO comprises a sequence of SEQ ID NO: 1, 2, 3, 4, 5, 6, 7, 8, 9, 10, 11, 12, 13, 14, 15, 16, 17, 18, 19, 20, 21, 22, 23, 24, 25, 26, 27, 28, 29, 30, 31, 32, 33, 34, 35, 36, 37, 38, 39, 40, 41, 42, 43, 44, 45, 46, 47, 48, 49, 50, 51, 52, 53, 54, 55, 56, 57, 58, 59, 60, 61, 62, 63, 64, 65, 66, 67, 68, 69, 70, 71, 72, 73, 74, 75, 76, 77, 78, 79, 80, 81, 82, 83, 84, 85, 86, 87, 88, 89, 90, 91, 92, 93, 94, 95, 96, 97, 98, 99, 100, 101, 102, 103, 104, 105, 106, 107, 108, 109, 110, 111, 112, 113, 114, 115, 116, 117, 118, 119, 120, 121, 122, 123, 124, 125, 126, 127, 128, 129, 130, 131, 132, 133, 134, 135, 136, 137, 138, 139, 140, 141, 142, 143, 144, 145, 146, 147, 148, 149, 150, 151, 152, 153, 154, 155, 156, 157, 158, 159, 160, 161, 162, 163, 164, 165, 166, 167, 168, 169, 170, 171, 172, 173, 174, 175, 176, 177, 178, 179, 180, 181, 182, 183, 184, 185, 186, 187, 188, 189, 190, 191, 192, 193, 194, 195, 196, 197, 198, 199, 200, 201, 202, 203, 204, 205, 206, 207, 208, 209, 210, 211, 212, 213, 214, 215, 216, 217, 218, 219, 220, 221, 222, 223, 224, 225, 226, 227, 228, 229, 230, 231, 232, 233, 234, 235, 236, 237, 238, 239, 240, 241, 242, 243, 244, 245, 246, 247, 248, 249, 250, 251, 252, 253, 254, 255, 256, 257, 258, 259, 260, 261, 262, 263, 264, 265, 266, 267, 268, 269, 270, 271, 272, 273, 274, 275, 276, 277, 278, 279, 280, 281, 282, 283, 284, 285, 286, 287, 288, 289, 290, 291, 292, 293, 294, 295, 296, 297, 298, 299, 300, 301, 312, or 313, a variant, derivative, orthologue, paralogue or homologue thereof, in which:

[1214] the amino acid at Mutated site 4 is Trp, and the amino acid at Mutated site 5 is Ser.

[1215] In another preferred embodiment, the mutated PPO comprises a sequence of SEQ ID NO: 1, 2, 3, 4, 5, 6, 7, 8, 9, 10, 11, 12, 13, 14, 15, 16, 17, 18, 19, 20, 21, 22, 23, 24, 25, 26, 27, 28, 29, 30, 31, 32, 33, 34, 35, 36, 37, 38, 39, 40, 41, 42, 43, 44, 45, 46, 47, 48, 49, 50, 51, 52, 53, 54, 55, 56, 57, 58, 59, 60, 61, 62, 63, 64, 65, 66, 67, 68, 69, 70, 71, 72, 73, 74, 75, 76, 77, 78, 79, 80, 81, 82, 83, 84, 85, 86, 87, 88, 89, 90, 91, 92, 93, 94, 95, 96, 97, 98, 99, 100, 101, 102, 103, 104, 105, 106, 107, 108, 109, 110, 111, 112, 113, 114, 115, 116, 117, 118, 119, 120, 121, 122, 123, 124, 125, 126, 127, 128, 129, 130, 131, 132, 133, 134, 135, 136, 137, 138, 139, 140, 141, 142, 143, 144, 145, 146, 147, 148, 149, 150, 151, 152, 153, 154, 155, 156, 157, 158, 159, 160, 161, 162, 163, 164, 165, 166, 167, 168, 169, 170, 171, 172, 173, 174, 175, 176, 177, 178, 179, 180, 181, 182, 183, 184, 185, 186, 187, 188, 189, 190, 191, 192, 193, 194, 195, 196, 197, 198, 199, 200, 201, 202, 203, 204, 205, 206, 207, 208, 209, 210, 211, 212, 213, 214, 215, 216, 217, 218, 219, 220, 221, 222, 223, 224, 225, 226, 227, 228, 229, 230, 231, 232, 233, 234, 235, 236, 237, 238, 239, 240, 241, 242, 243, 244, 245, 246, 247, 248, 249, 250, 251, 252, 253, 254, 255, 256, 257, 258, 259, 260, 261, 262, 263, 264, 265, 266, 267, 268, 269, 270, 271, 272, 273, 274, 275, 276, 277, 278, 279, 280, 281, 282, 283, 284, 285, 286, 287, 288, 289, 290, 291, 292, 293, 294, 295, 296, 297, 298, 299, 300, 301, 312, or 313, a variant, derivative, orthologue, paralogue or homologue thereof, in which:

[1216] the amino acid at Mutated site 4 is Trp, and the amino acid at Mutated site 5 is Thr.

[1217] In another preferred embodiment, the mutated PPO comprises a sequence of SEQ ID NO: 1, 2, 3, 4, 5, 6, 7, 8, 9, 10, 11, 12, 13, 14, 15, 16, 17, 18, 19, 20, 21, 22, 23, 24, 25, 26, 27, 28, 29, 30, 31, 32, 33, 34, 35, 36, 37, 38, 39, 40, 41, 42, 43, 44, 45, 46, 47, 48, 49, 50, 51, 52, 53, 54, 55, 56, 57, 58, 59, 60, 61, 62, 63, 64, 65, 66, 67, 68, 69, 70, 71, 72, 73, 74, 75, 76, 77, 78, 79, 80, 81, 82, 83, 84, 85, 86, 87, 88, 89, 90, 91, 92, 93, 94, 95, 96, 97, 98, 99, 100, 101, 102, 103, 104, 105, 106, 107, 108, 109, 110, 111, 112, 113, 114, 115, 116, 117, 118, 119, 120, 121, 122, 123, 124, 125, 126, 127, 128, 129, 130, 131, 132, 133, 134, 135, 136, 137, 138, 139, 140, 141, 142, 143, 144, 145, 146, 147, 148, 149, 150, 151, 152, 153, 154, 155, 156, 157, 158, 159, 160, 161, 162, 163, 164, 165, 166, 167, 168, 169, 170, 171, 172, 173, 174, 175, 176, 177, 178, 179, 180, 181, 182, 183, 184, 185, 186, 187, 188, 189, 190, 191, 192, 193, 194, 195, 196, 197, 198, 199, 200, 201, 202, 203, 204, 205, 206, 207, 208, 209, 210, 211, 212, 213, 214, 215, 216, 217, 218, 219, 220, 221, 222, 223, 224, 225, 226, 227, 228, 229, 230, 231, 232, 233, 234, 235, 236, 237, 238, 239, 240, 241, 242, 243, 244, 245, 246, 247, 248, 249, 250, 251, 252, 253, 254, 255, 256, 257, 258, 259, 260, 261, 262, 263, 264, 265, 266, 267, 268, 269, 270, 271, 272, 273, 274, 275, 276, 277, 278, 279, 280, 281, 282, 283, 284, 285, 286, 287, 288, 289, 290, 291, 292, 293, 294, 295, 296, 297, 298, 299, 300, 301, 312, or 313, a variant, derivative, orthologue, paralogue or homologue thereof, in which:

[1218] the amino acid at Mutated site 4 is Trp, and the amino acid at Mutated site 5 is Asn.

[1219] In another preferred embodiment, the mutated PPO comprises a sequence of SEQ ID NO: 1, 2, 3, 4, 5, 6, 7, 8, 9, 10, 11, 12, 13, 14, 15, 16, 17, 18, 19, 20, 21, 22, 23, 24, 25, 26, 27, 28, 29, 30, 31, 32, 33, 34, 35, 36, 37, 38, 39, 40, 41, 42, 43, 44, 45, 46, 47, 48, 49, 50, 51, 52, 53, 54, 55, 56, 57, 58, 59, 60, 61, 62, 63, 64, 65, 66, 67, 68, 69, 70, 71, 72, 73, 74, 75, 76, 77, 78, 79, 80, 81, 82, 83, 84, 85, 86, 87, 88, 89, 90, 91, 92, 93, 94, 95, 96, 97, 98, 99, 100, 101, 102, 103, 104, 105, 106, 107, 108, 109, 110, 111, 112, 113, 114, 115, 116, 117, 118, 119, 120, 121, 122, 123, 124, 125, 126, 127, 128, 129, 130, 131, 132, 133, 134, 135, 136, 137, 138, 139, 140, 141, 142, 143, 144, 145, 146, 147, 148, 149, 150, 151, 152, 153, 154, 155, 156, 157, 158, 159, 160, 161, 162, 163, 164, 165, 166, 167, 168, 169, 170, 171, 172, 173, 174, 175, 176, 177, 178, 179, 180, 181, 182, 183, 184, 185, 186, 187, 188, 189, 190, 191, 192, 193, 194, 195, 196, 197, 198, 199, 200, 201, 202, 203, 204, 205, 206, 207, 208, 209, 210, 211, 212, 213, 214, 215, 216, 217, 218, 219, 220, 221, 222, 223, 224, 225, 226, 227, 228, 229, 230, 231, 232, 233, 234, 235, 236, 237, 238, 239, 240, 241, 242, 243, 244, 245, 246, 247, 248, 249, 250, 251, 252, 253, 254, 255, 256, 257, 258, 259, 260, 261, 262, 263, 264, 265, 266, 267, 268, 269, 270, 271, 272, 273, 274, 275, 276, 277, 278, 279, 280, 281, 282, 283, 284, 285, 286, 287, 288, 289, 290, 291, 292, 293, 294, 295, 296, 297, 298, 299, 300, 301, 312, or 313, a variant, derivative, orthologue, paralogue or homologue thereof, in which:

[1220] the amino acid at Mutated site 4 is Trp, and the amino acid at Mutated site 5 is Gln.

[1221] In another preferred embodiment, the mutated PPO comprises a sequence of SEQ ID NO: 1, 2, 3, 4, 5, 6, 7, 8, 9, 10, 11, 12, 13, 14, 15, 16, 17, 18, 19, 20, 21, 22, 23, 24, 25, 26, 27, 28, 29, 30, 31, 32, 33, 34, 35, 36, 37, 38, 39, 40, 41, 42, 43, 44, 45, 46, 47, 48, 49, 50, 51, 52, 53, 54, 55, 56, 57, 58, 59, 60, 61, 62, 63, 64, 65, 66, 67, 68, 69, 70, 71, 72, 73, 74, 75, 76, 77, 78, 79, 80, 81, 82, 83, 84, 85, 86, 87, 88, 89, 90, 91, 92, 93, 94, 95, 96, 97, 98, 99, 100, 101, 102, 103, 104, 105, 106, 107, 108, 109, 110, 111, 112, 113, 114, 115, 116, 117, 118, 119, 120, 121, 122, 123, 124, 125, 126, 127, 128, 129, 130, 131, 132, 133, 134, 135, 136, 137, 138, 139, 140, 141, 142, 143, 144, 145, 146, 147, 148, 149, 150, 151, 152, 153, 154, 155, 156, 157, 158, 159, 160, 161, 162, 163, 164, 165, 166, 167, 168, 169, 170, 171, 172, 173, 174, 175, 176, 177, 178, 179, 180, 181, 182, 183, 184, 185, 186, 187, 188, 189, 190, 191, 192, 193, 194, 195, 196, 197, 198, 199, 200, 201, 202, 203, 204, 205, 206, 207, 208, 209, 210, 211, 212, 213, 214, 215, 216, 217, 218, 219, 220, 221, 222, 223, 224, 225, 226, 227, 228, 229, 230, 231, 232, 233, 234, 235, 236, 237, 238, 239, 240, 241, 242, 243, 244, 245, 246, 247, 248, 249, 250, 251, 252, 253, 254, 255, 256, 257, 258, 259, 260, 261, 262, 263, 264, 265, 266, 267, 268, 269, 270, 271, 272, 273, 274, 275, 276, 277, 278, 279, 280, 281, 282, 283, 284, 285, 286, 287, 288, 289, 290, 291, 292, 293, 294, 295, 296, 297, 298, 299, 300, 301, 312, or 313, a variant, derivative, orthologue, paralogue or homologue thereof, in which:

[1222] the amino acid at Mutated site 4 is Trp, and the amino acid at Mutated site 5 is Cys.

[1223] In another preferred embodiment, the mutated PPO comprises a sequence of SEQ ID NO: 1, 2, 3, 4, 5, 6, 7, 8, 9, 10, 11, 12, 13, 14, 15, 16, 17, 18, 19, 20, 21, 22, 23, 24, 25, 26, 27, 28, 29, 30, 31, 32, 33, 34, 35, 36, 37, 38, 39, 40, 41, 42, 43, 44, 45, 46, 47, 48, 49, 50, 51, 52, 53, 54, 55, 56, 57, 58, 59, 60, 61, 62, 63, 64, 65, 66, 67, 68, 69, 70, 71, 72, 73, 74, 75, 76, 77, 78, 79, 80, 81, 82, 83, 84, 85, 86, 87, 88, 89, 90, 91, 92, 93, 94, 95, 96, 97, 98, 99, 100, 101, 102, 103, 104, 105, 106, 107, 108, 109, 110, 111, 112, 113, 114, 115, 116, 117, 118, 119, 120, 121, 122, 123, 124, 125, 126, 127, 128, 129, 130, 131, 132, 133, 134, 135, 136, 137, 138, 139, 140, 141, 142, 143, 144, 145, 146, 147, 148, 149, 150, 151, 152, 153, 154, 155, 156, 157, 158, 159, 160, 161, 162, 163, 164, 165, 166, 167, 168, 169, 170, 171, 172, 173, 174, 175, 176, 177, 178, 179, 180, 181, 182, 183, 184, 185, 186, 187, 188, 189, 190, 191, 192, 193, 194, 195, 196, 197, 198, 199, 200, 201, 202, 203, 204, 205, 206, 207, 208, 209, 210, 211, 212, 213, 214, 215, 216, 217, 218, 219, 220, 221, 222, 223, 224, 225, 226, 227, 228, 229, 230, 231, 232, 233, 234, 235, 236, 237, 238, 239, 240, 241, 242, 243, 244, 245, 246, 247, 248, 249, 250, 251, 252, 253, 254, 255, 256, 257, 258, 259, 260, 261, 262, 263, 264, 265, 266, 267, 268, 269, 270, 271, 272, 273, 274, 275, 276, 277, 278, 279, 280, 281, 282, 283, 284, 285, 286, 287, 288, 289, 290, 291, 292, 293, 294, 295, 296, 297, 298, 299, 300, 301, 312, or 313, a variant, derivative, orthologue, paralogue or homologue thereof, in which:

[1224] the amino acid at Mutated site 4 is Trp, and the amino acid at Mutated site 5 is Gly.

[1225] In another preferred embodiment, the mutated PPO comprises a sequence of SEQ ID NO: 1, 2, 3, 4, 5, 6, 7, 8, 9, 10, 11, 12, 13, 14, 15, 16, 17, 18, 19, 20, 21, 22, 23, 24, 25, 26, 27, 28, 29, 30, 31, 32, 33, 34, 35, 36, 37, 38, 39, 40, 41, 42, 43, 44, 45, 46, 47, 48, 49, 50, 51, 52, 53, 54, 55, 56, 57, 58, 59, 60, 61, 62, 63, 64, 65, 66, 67, 68, 69, 70, 71, 72, 73, 74, 75, 76, 77, 78, 79, 80, 81, 82, 83, 84, 85, 86, 87, 88, 89, 90, 91, 92, 93, 94, 95, 96, 97, 98, 99, 100, 101, 102, 103, 104, 105, 106, 107, 108, 109, 110, 111, 112, 113, 114, 115, 116, 117, 118, 119, 120, 121, 122, 123, 124, 125, 126, 127, 128, 129, 130, 131, 132, 133, 134, 135, 136, 137, 138, 139, 140, 141, 142, 143, 144, 145, 146, 147, 148, 149, 150, 151, 152, 153, 154, 155, 156, 157, 158, 159, 160, 161, 162, 163, 164, 165, 166, 167, 168, 169, 170, 171, 172, 173, 174, 175, 176, 177, 178, 179, 180, 181, 182, 183, 184, 185, 186, 187, 188, 189, 190, 191, 192, 193, 194, 195, 196, 197, 198, 199, 200, 201, 202, 203, 204, 205, 206, 207, 208, 209, 210, 211, 212, 213, 214, 215, 216, 217, 218, 219, 220, 221, 222, 223, 224, 225, 226, 227, 228, 229, 230, 231, 232, 233, 234, 235, 236, 237, 238, 239, 240, 241, 242, 243, 244, 245, 246, 247, 248, 249, 250, 251, 252, 253, 254, 255, 256, 257, 258, 259, 260, 261, 262, 263, 264, 265, 266, 267, 268, 269, 270, 271, 272, 273, 274, 275, 276, 277, 278, 279, 280, 281, 282, 283, 284, 285, 286, 287, 288, 289, 290, 291, 292, 293, 294, 295, 296, 297, 298, 299, 300, 301, 312, or 313, a variant, derivative, orthologue, paralogue or homologue thereof, in which:

[1226] the amino acid at Mutated site 4 is Trp, and the amino acid at Mutated site 5 is Pro.

[1227] In another preferred embodiment, the mutated PPO comprises a sequence of SEQ ID NO: 1, 2, 3, 4, 5, 6, 7, 8, 9, 10, 11, 12, 13, 14, 15, 16, 17, 18, 19, 20, 21, 22, 23, 24, 25, 26, 27, 28, 29, 30, 31, 32, 33, 34, 35, 36, 37, 38, 39, 40, 41, 42, 43, 44, 45, 46, 47, 48, 49, 50, 51, 52, 53, 54, 55, 56, 57, 58, 59, 60, 61, 62, 63, 64, 65, 66, 67, 68, 69, 70, 71, 72, 73, 74, 75, 76, 77, 78, 79, 80, 81, 82, 83, 84, 85, 86, 87, 88, 89, 90, 91, 92, 93, 94, 95, 96, 97, 98, 99, 100, 101, 102, 103, 104, 105, 106, 107, 108, 109, 110, 111, 112, 113, 114, 115, 116, 117, 118, 119, 120, 121, 122, 123, 124, 125, 126, 127, 128, 129, 130, 131, 132, 133, 134, 135, 136, 137, 138, 139, 140, 141, 142, 143, 144, 145, 146, 147, 148, 149, 150, 151, 152, 153, 154, 155, 156, 157, 158, 159, 160, 161, 162, 163, 164, 165, 166, 167, 168, 169, 170, 171, 172, 173, 174, 175, 176, 177, 178, 179, 180, 181, 182, 183, 184, 185, 186, 187, 188, 189, 190, 191, 192, 193, 194, 195, 196, 197, 198, 199, 200, 201, 202, 203, 204, 205, 206, 207, 208, 209, 210, 211, 212, 213, 214, 215, 216, 217, 218, 219, 220, 221, 222, 223, 224, 225, 226, 227, 228, 229, 230, 231, 232, 233, 234, 235, 236, 237, 238, 239, 240, 241, 242, 243, 244, 245, 246, 247, 248, 249, 250, 251, 252, 253, 254, 255, 256, 257, 258, 259, 260, 261, 262, 263, 264, 265, 266, 267, 268, 269, 270, 271, 272, 273, 274, 275, 276, 277, 278, 279, 280, 281, 282, 283, 284, 285, 286, 287, 288, 289, 290, 291, 292, 293, 294, 295, 296, 297, 298, 299, 300, 301, 312, or 313, a variant, derivative, orthologue, paralogue or homologue thereof, in which:

[1228] the amino acid at Mutated site 4 is Trp, and the amino acid at Mutated site 5 is Arg.

[1229] In another preferred embodiment, the mutated PPO comprises a sequence of SEQ ID NO: 1, 2, 3, 4, 5, 6, 7, 8, 9, 10, 11, 12, 13, 14, 15, 16, 17, 18, 19, 20, 21, 22, 23, 24, 25, 26, 27, 28, 29, 30, 31, 32, 33, 34, 35, 36, 37, 38, 39, 40, 41, 42, 43, 44, 45, 46, 47, 48, 49, 50, 51, 52, 53, 54, 55, 56, 57, 58, 59, 60, 61, 62, 63, 64, 65, 66, 67, 68, 69, 70, 71, 72, 73, 74, 75, 76, 77, 78, 79, 80, 81, 82, 83, 84, 85, 86, 87, 88, 89, 90, 91, 92, 93, 94, 95, 96, 97, 98, 99, 100, 101, 102, 103, 104, 105, 106, 107, 108, 109, 110, 111, 112, 113, 114, 115, 116, 117, 118, 119, 120, 121, 122, 123, 124, 125, 126, 127, 128, 129, 130, 131, 132, 133, 134, 135, 136, 137, 138, 139, 140, 141, 142, 143, 144, 145, 146, 147, 148, 149, 150, 151, 152, 153, 154, 155, 156, 157, 158, 159, 160, 161, 162, 163, 164, 165, 166, 167, 168, 169, 170, 171, 172, 173, 174, 175, 176, 177, 178, 179, 180, 181, 182, 183, 184, 185, 186, 187, 188, 189, 190, 191, 192, 193, 194, 195, 196, 197, 198, 199, 200, 201, 202, 203, 204, 205, 206, 207, 208, 209, 210, 211, 212, 213, 214, 215, 216, 217, 218, 219, 220, 221, 222, 223, 224, 225, 226, 227, 228, 229, 230, 231, 232, 233, 234, 235, 236, 237, 238, 239, 240, 241, 242, 243, 244, 245, 246, 247, 248, 249, 250, 251, 252, 253, 254, 255, 256, 257, 258, 259, 260, 261, 262, 263, 264, 265, 266, 267, 268, 269, 270, 271, 272, 273, 274, 275, 276, 277, 278, 279, 280, 281, 282, 283, 284, 285, 286, 287, 288, 289, 290, 291, 292, 293, 294, 295, 296, 297, 298, 299, 300, 301, 312, or 313, a variant, derivative, orthologue, paralogue or homologue thereof, in which:

[1230] the amino acid at Mutated site 4 is Trp, and the amino acid at Mutated site 5 is Tyr.

[1231] In another preferred embodiment, the mutated PPO comprises a sequence of SEQ ID NO: 1, 2, 3, 4, 5, 6, 7, 8, 9, 10, 11, 12, 13, 14, 15, 16, 17, 18, 19, 20, 21, 22, 23, 24, 25, 26, 27, 28, 29, 30, 31, 32, 33, 34, 35, 36, 37, 38, 39, 40, 41, 42, 43, 44, 45, 46, 47, 48, 49, 50, 51, 52, 53, 54, 55, 56, 57, 58, 59, 60, 61, 62, 63, 64, 65, 66, 67, 68, 69, 70, 71, 72, 73, 74, 75, 76, 77, 78, 79, 80, 81, 82, 83, 84, 85, 86, 87, 88, 89, 90, 91, 92, 93, 94, 95, 96, 97, 98, 99, 100, 101, 102, 103, 104, 105, 106, 107, 108, 109, 110, 111, 112, 113, 114, 115, 116, 117, 118, 119, 120, 121, 122, 123, 124, 125, 126, 127, 128, 129, 130, 131, 132, 133, 134, 135, 136, 137, 138, 139, 140, 141, 142, 143, 144, 145, 146, 147, 148, 149, 150, 151, 152, 153, 154, 155, 156, 157, 158, 159, 160, 161, 162, 163, 164, 165, 166, 167, 168, 169, 170, 171, 172, 173, 174, 175, 176, 177, 178, 179, 180, 181, 182, 183, 184, 185, 186, 187, 188, 189, 190, 191, 192, 193, 194, 195, 196, 197, 198, 199, 200, 201, 202, 203, 204, 205, 206, 207, 208, 209, 210, 211, 212, 213, 214, 215, 216, 217, 218, 219, 220, 221, 222, 223, 224, 225, 226, 227, 228, 229, 230, 231, 232, 233, 234, 235, 236, 237, 238, 239, 240, 241, 242, 243, 244, 245, 246, 247, 248, 249, 250, 251, 252, 253, 254, 255, 256, 257, 258, 259, 260, 261, 262, 263, 264, 265, 266, 267, 268, 269, 270, 271, 272, 273, 274, 275, 276, 277, 278, 279, 280, 281, 282, 283, 284, 285, 286, 287, 288, 289, 290, 291, 292, 293, 294, 295, 296, 297, 298, 299, 300, 301, 312, or 313, a variant, derivative, orthologue, paralogue or homologue thereof, in which:

[1232] the amino acid at Mutated site 4 is Trp, and the amino acid at Mutated site 5 is Trp.

[1233] It will be within the knowledge of the skilled artisan to identify conserved regions and motifs shared between the homologues, orthologues and paralogues of PPO polypeptides comprising SEQ ID NO: 1, 2, 3, 4, 5, 6, 7, 8, 9, 10, 11, 12, 13, 14, 15, 16, 17, 18, 19, 20, 21, 22, 23, 24, 25, 26, 27, 28, 29, 30, 31, 32, 33, 34, 35, 36, 37, 38, 39, 40, 41, 42, 43, 44, 45, 46, 47, 48, 49, 50, 51, 52, 53, 54, 55, 56, 57, 58, 59, 60, 61, 62, 63, 64, 65, 66, 67, 68, 69, 70, 71, 72, 73, 74, 75, 76, 77, 78, 79, 80, 81, 82, 83, 84, 85, 86, 87, 88, 89, 90, 91, 92, 93, 94, 95, 96, 97, 98, 99, 100, 101, 102, 103, 104, 105, 106, 107, 108, 109, 110, 111, 112, 113, 114, 115, 116, 117, 118, 119, 120, 121, 122, 123, 124, 125, 126, 127, 128, 129, 130, 131, 132, 133, 134, 135, 136, 137, 138, 139, 140, 141, 142, 143, 144, 145, 146, 147, 148, 149, 150, 151, 152, 153, 154, 155, 156, 157, 158, 159, 160, 161, 162, 163, 164, 165, 166, 167, 168, 169, 170, 171, 172, 173, 174, 175, 176, 177, 178, 179, 180, 181, 182, 183, 184, 185, 186, 187, 188, 189, 190, 191, 192, 193, 194, 195, 196, 197, 198, 199, 200, 201, 202, 203, 204, 205, 206, 207, 208, 209, 210, 211, 212, 213, 214, 215, 216, 217, 218, 219, 220, 221, 222, 223, 224, 225, 226, 227, 228, 229, 230, 231, 232, 233, 234, 235, 236, 237, 238, 239, 240, 241, 242, 243, 244, 245, 246, 247, 248, 249, 250, 251, 252, 253, 254, 255, 256, 257, 258, 259, 260, 261, 262, 263, 264, 265, 266, 267, 268, 269, 270, 271, 272, 273, 274, 275, 276, 277, 278, 279, 280, 281, 282, 283, 284, 285, 286, 287, 288, 289, 290, 291, 292, 293, 294, 295, 296, 297, 298, 299, 300, 301, 312, or 313. Having identified such conserved regions that may represent suitable binding motifs, amino acids corresponding to the amino acids listed in Table 2a and 2b can be chosen to be subsituted by any other amino acid, preferably by the amino acids listed under mutated sites 1, 2, 3, 4, or 5.

[1234] In addition, the present invention refers to a method for identifying a PPO-inhibiting herbicide by using a wildtype or mutated PPO comprising the amino acid sequence of SEQ ID NO: 1, 2, 3, 4, 5, 6, 7, 8, 9, 10, 11, 12, 13, 14, 15, 16, 17, 18, 19, 20, 21, 22, 23, 24, 25, 26, 27, 28, 29, 30, 31, 32, 33, 34, 35, 36, 37, 38, 39, 40, 41, 42, 43, 44, 45, 46, 47, 48, 49, 50, 51, 52, 53, 54, 55, 56, 57, 58, 59, 60, 61, 62, 63, 64, 65, 66, 67, 68, 69, 70, 71, 72, 73, 74, 75, 76, 77, 78, 79, 80, 81, 82, 83, 84, 85, 86, 87, 88, 89, 90, 91, 92, 93, 94, 95, 96, 97, 98, 99, 100, 101, 102, 103, 104, 105, 106, 107, 108, 109, 110, 111, 112, 113, 114, 115, 116, 117, 118, 119, 120, 121, 122, 123, 124, 125, 126, 127, 128, 129, 130, 131, 132, 133, 134, 135, 136, 137, 138, 139, 140, 141, 142, 143, 144, 145, 146, 147, 148, 149, 150, 151, 152, 153, 154, 155, 156, 157, 158, 159, 160, 161, 162, 163, 164, 165, 166, 167, 168, 169, 170, 171, 172, 173, 174, 175, 176, 177, 178, 179, 180, 181, 182, 183, 184, 185, 186, 187, 188, 189, 190, 191, 192, 193, 194, 195, 196, 197, 198, 199, 200, 201, 202, 203, 204, 205, 206, 207, 208, 209, 210, 211, 212, 213, 214, 215, 216, 217, 218, 219, 220, 221, 222, 223, 224, 225, 226, 227, 228, 229, 230, 231, 232, 233, 234, 235, 236, 237, 238, 239, 240, 241, 242, 243, 244, 245, 246, 247, 248, 249, 250, 251, 252, 253, 254, 255, 256, 257, 258, 259, 260, 261, 262, 263, 264, 265, 266, 267, 268, 269, 270, 271, 272, 273, 274, 275, 276, 277, 278, 279, 280, 281, 282, 283, 284, 285, 286, 287, 288, 289, 290, 291, 292, 293, 294, 295, 296, 297, 298, 299, 300, 301, 312, or 313, or a variant or derivative thereof.

[1235] Said method comprises the steps of:
[1236] a) generating a transgenic cell or plant comprising a nucleic acid encoding a wildtype or mutated PPO, wherein the mutated PPO is expressed;
[1237] b) applying a PPO-inhibiting herbicide to the transgenic cell or plant of a) and to a control cell or plant of the same variety;
[1238] c) determining the growth or the viability of the transgenic cell or plant and the control cell or plant after application of said PPO-inhibiting herbicide, and
[1239] d) selecting “PPO-inhibiting herbicides” which confer reduced growth to the control cell or plant as compared to the growth of the transgenic cell or plant.

[1240] By “control cell” or “similar, wild-type, plant, plant tissue, plant cell or host cell” is intended a plant, plant tissue, plant cell, or host cell, respectively, that lacks the herbicide-resistance characteristics and/or particular polynucleotide of the invention that are disclosed herein. The use of the term “wild-type” is not, therefore, intended to imply that a plant, plant tissue, plant cell, or other host cell lacks recombinant DNA in its genome, and/or does not possess herbicide-resistant characteristics that are different from those disclosed herein.

[1241] Another object refers to a method of identifying a nucleotide sequence encoding a mutated PPO which is resistant or tolerant to a PPO-inhibiting herbicide, the method comprising:
[1242] a) generating a library of mutated PPO-encoding nucleic acids,
[1243] b) screening a population of the resulting mutated PPO-encoding nucleic acids by expressing each of said nucleic acids in a cell or plant and treating said cell or plant with a PPO-inhibiting herbicide,
[1244] c) comparing the PPO-inhibiting herbicide-tolerance levels provided by said population of mutated PPO encoding nucleic acids with the PPO-inhibiting herbicide-tolerance level provided by a control PPO-encoding nucleic acid,
[1245] d) selecting at least one mutated PPO-encoding nucleic acid that provides a significantly increased level of tolerance to a PPO-inhibiting herbicide as compared to that provided by the control PPO-encoding nucleic acid.

[1246] In a preferred embodiment, the mutated PPO-encoding nucleic acid selected in step d) provides at least 2-fold as much resistance or tolerance of a cell or plant to a PPO-inhibiting herbicide as compared to that provided by the control PPO-encoding nucleic acid.

[1247] In a further preferred embodiment, the mutated PPO-encoding nucleic acid selected in step d) provides at least 2-fold, at least 5-fold, at least 10-fold, at least 20-fold, at least 50-fold, at least 100-fold, at least 500-fold, as much resistance or tolerance of a cell or plant to a PPO-inhibiting herbicide as compared to that provided by the control PPO-encoding nucleic acid.

[1248] The resistance or tolerance can be determined by generating a transgenic plant or host cell, preferably a plant cell, comprising a nucleic acid sequence of the library of step a) and comparing said transgenic plant with a control plant or host cell, preferably a plant cell.

[1249] Another object refers to a method of identifying a plant or algae containing a nucleic acid comprising a nucleotide sequence encoding a wild-type or mutated PPO which is resistant or tolerant to a PPO-inhibiting herbicide, the method comprising:
[1250] a) identifying an effective amount of a PPO-inhibiting herbicide in a culture of plant cells or green algae that leads to death of said cells.
[1251] b) treating said plant cells or green algae with a mutagenizing agent,
[1252] c) contacting said mutagenized cells population with an effective amount of PPO-inhibiting herbicide, identified in a),
[1253] d) selecting at least one cell surviving these test conditions,
[1254] e) PCR-amplification and sequencing of PPO genes from cells selected in d) and comparing such sequences to wild-type PPO gene sequences, respectively.

[1255] In a preferred embodiment, said mutagenizing agent is ethylmethanesulfonate (EMS). Many methods well known to the skilled artisan are available for obtaining suitable candidate nucleic acids for identifying a nucleotide sequence encoding a mutated PPO from a variety of different potential source organisms including microbes, plants, fungi, algae, mixed cultures etc. as well as environmental sources of DNA such as soil. These methods include inter alia the preparation of cDNA or genomic DNA libraries, the use of suitably degenerate oligonucleotide primers, the use of probes based upon known sequences or complementation assays (for example, for growth upon tyrosine) as well as the use of mutagenesis and shuffling in order to provide recombined or shuffled mutated PPO-encoding sequences.

[1256] Nucleic acids comprising candidate and control PPO encoding sequences can be expressed in yeast, in a bacterial host strain, in an alga or in a higher plant such as tobacco or Arabidopsis and the relative levels of inherent tolerance of the PPO encoding sequences screened according to a visible indicator phenotype of the transformed strain or plant in the presence of different concentrations of the selected PPO-inhibiting herbicide. Dose responses and relative shifts in dose responses associated with these indicator phenotypes (formation of brown color, growth inhibition, herbicidal effect etc) are conveniently expressed in terms, for example, of GR50 (concentration for 50% reduction of growth) or MIC (minimum inhibitory concentration) values where increases in values correspond to increases in inherent tolerance of the expressed PPO. For example, in a relatively rapid assay system based upon transformation of a bacterium such as E. coli, each mutated PPO encoding sequence may be expressed, for example, as a DNA sequence under expression control of a controllable promoter such as the lacZ promoter and taking suitable account, for example by the use of synthetic DNA, of such issues as codon usage in order to obtain as comparable a level of expression as possible of different PPO sequences. Such strains expressing nucleic acids comprising alternative candidate PPO sequences may be plated out on different concentrations of the selected PPO-inhibiting herbicide in, optionally, a tyrosine supplemented medium and the relative levels of inherent tolerance of the expressed PPO enzymes estimated on the basis of the extent and MIC for inhibition of the formation of the brown, ochronotic pigment.

[1257] In another embodiment, candidate nucleic acids are transformed into plant material to generate a transgenic plant, regenerated into morphologically normal fertile plants which are then measured for differential tolerance to selected PPO-inhibiting herbicides as described in the Example section hereinafter. Many suitable methods for transformation using suitable selection markers such as kanamycin, binary vectors such as from Agrobacterium and plant regeneration as, for example, from tobacco leaf discs are well known in the art. Optionally, a control population of plants is likewise transformed with a nucleic acid expressing the control PPO. Alternatively, an untransformed dicot plant such as Arabidopsis or Tobacco can be used as a control since this, in any case, expresses its own endogenous PPO. The average, and distribution, of herbicide tolerance levels of a range of primary plant transformation events or their progeny to PPO-inhibiting herbicides described supra are evaluated in the normal manner based upon plant damage, meristematic bleaching symptoms etc. at a range of different concentrations of herbicides. These data can be expressed in terms of, for example, GR50 values derived from dose/response curves having “dose” plotted on the x-axis and “percentage kill”, “herbicidal effect”, “numbers of emerging green plants” etc. plotted on the y-axis where increased GR50 values correspond to increased levels of inherent tolerance of the expressed PPO. Herbicides can suitably be applied pre-emergence or post-emergence.

[1258] Another object of the present invention refers to an isolated and/or recombinant and/or chemically synthesized nucleic acid encoding a mutated PPO comprising an amino acid sequence of SEQ ID NO: 1, 2, 3, 4, 5, 6, 7, 8, 9, 10, 11, 12, 13, 14, 15, 16, 17, 18, 19, 20, 21, 22, 23, 24, 25, 26, 27, 28, 29, 30, 31, 32, 33, 34, 35, 36, 37, 38, 39, 40, 41, 42, 43, 44, 45, 46, 47, 48, 49, 50, 51, 52, 53, 54, 55, 56, 57, 58, 59, 60, 61, 62, 63, 64, 65, 66, 67, 68, 69, 70, 71, 72, 73, 74, 75, 76, 77, 78, 79, 80, 81, 82, 83, 84, 85, 86, 87, 88, 89, 90, 91, 92, 93, 94, 95, 96, 97, 98, 99, 100, 101, 102, 103, 104, 105, 106, 107, 108, 109, 110, 111, 112, 113, 114, 115, 116, 117, 118, 119, 120, 121, 122, 123, 124, 125, 126, 127, 128, 129, 130, 131, 132, 133, 134, 135, 136, 137, 138, 139, 140, 141, 142, 143, 144, 145, 146, 147, 148, 149, 150, 151, 152, 153, 154, 155, 156, 157, 158, 159, 160, 161, 162, 163, 164, 165, 166, 167, 168, 169, 170, 171, 172, 173, 174, 175, 176, 177, 178, 179, 180, 181, 182, 183, 184, 185, 186, 187, 188, 189, 190, 191, 192, 193, 194, 195, 196, 197, 198, 199, 200, 201, 202, 203, 204, 205, 206, 207, 208, 209, 210, 211, 212, 213, 214, 215, 216, 217, 218, 219, 220, 221, 222, 223, 224, 225, 226, 227, 228, 229, 230, 231, 232, 233, 234, 235, 236, 237, 238, 239, 240, 241, 242, 243, 244, 245, 246, 247, 248, 249, 250, 251, 252, 253, 254, 255, 256, 257, 258, 259, 260, 261, 262, 263, 264, 265, 266, 267, 268, 269, 270, 271, 272, 273, 274, 275, 276, 277, 278, 279, 280, 281, 282, 283, 284, 285, 286, 287, 288, 289, 290, 291, 292, 293, 294, 295, 296, 297, 298, 299, 300, 301, 312, or 313 or a variant or derivative thereof.

[1259] In one embodiment, the nucleic acid is identifiable by a method as defined above.

[1260] In a preferred embodiment, the encoded mutated PPO is a variant of SEQ ID NO: 1, 11, 30, 31, 37, 117, 118, 119, 120, 121, 122, 123, 124, 125, 126, 127, 128, 129, 130, 131, 132, 133, 134, 135, 136, 137, 138, 139, 140, 141, 142, 143, 144, 145, 146, 147, 148, 149, 150, 151, 152, 153, 154, 155, 156, 157, 158, 159, 160, 161, 162, 163, 164, 165, 166, 167, 168, 169, 170, 171, 172, 173, 174, 175, 176, 177, 178, 179, 180, 181, 182, 183, 184, 185, 186, 187, 188, 189, 190, 191, 192, 193, 194, 195, 196, 197, 198, 199, 200, 201, 202, 203, 204, 205, 206, 207, 208, 209, 210, 211, 212, 213, 214, 215, 216, 217, 218, 219, 220, 221, 222, 223, 224, 225, 226, 227, 228, 229, 230, 231, 232, 233, 234, 235, 236, 237, 238, 239, 240, 241, 242, 243, 244, 245, 246, 247, 248, 249, 250, 251, 252, 253, 254, 255, 256, 257, 258, 259, 260, 261, 262, 263, 264, 265, 266, 267, 268, 269, 270, 271, 272, 273, 274, 275, 276, 277, 278, 279, 280, 281, 282, 283, 284, 285, 286, 287, 288, 289, 290, 291, 292, 293, 294, 295, 296, 297, 298, 299, 300, 301, 312, or 313, or an orthologue thereof, which includes one or more of the following:

[1261] the amino acid corresponding to Mutated site 1 is Leu, Ala, Val, Ile, Met, Tyr, Gly, Asn, Cys, Phe, Ser, Thr, Gln, or His;

[1262] and/or the amino acid at or corresponding to Mutated site 4 is Ala, Arg, Val, Ile, Met, His, Lys, Asp, Glu, Ser, Thr, Asn, Gln, Cys, Gly, Pro, Phe, Tyr, or Trp, and/or

[1263] and the amino acid at Mutated site 5 is Ala, Leu, Val, Ile, Met, His, Lys, Asp, Glu, Ser, Thr, Asn, Gln, Cys, Gly, Pro, Arg, Tyr, or Trp.

[1264] In another embodiment, the invention refers to a plant cell transformed by a nucleic acid encoding a mutated PPO polypeptide according to the present invention or to a plant cell which has been mutated to obtain a plant expressing a nucleic acid encoding a mutated PPO polypeptide according to the present invention, wherein expression of the nucleic acid in the plant cell results in increased resistance or tolerance to a PPO-inhibiting herbicide as compared to a wild type variety of the plant cell. Preferably, the mutated PPO polypeptide encoding nucleic acid comprises a) a polynucleotide encoding a polypeptide as shown in SEQ ID NO: 1, 2, 3, 4, 5, 6, 7, 8, 9, 10, 11, 12, 13, 14, 15, 16, 17, 18, 19, 20, 21, 22, 23, 24, 25, 26, 27, 28, 29, 30, 31, 32, 33, 34, 35, 36, 37, 38, 39, 40, 41, 42, 43, 44, 45, 46, 47, 48, 49, 50, 51, 52, 53, 54, 55, 56, 57, 58, 59, 60, 61, 62, 63, 64, 65, 66, 67, 68, 69, 70, 71, 72, 73, 74, 75, 76, 77, 78, 79, 80, 81, 82, 83, 84, 85, 86, 87, 88, 89, 90, 91, 92, 93, 94, 95, 96, 97, 98, 99, 100, 101, 102, 103, 104, 105, 106, 107, 108, 109, 110, 111, 112, 113, 114, 115, 116, 117, 118, 119, 120, 121, 122, 123, 124, 125, 126, 127, 128, 129, 130, 131, 132, 133, 134, 135, 136, 137, 138, 139, 140, 141, 142, 143, 144, 145, 146, 147, 148, 149, 150, 151, 152, 153, 154, 155, 156, 157, 158, 159, 160, 161, 162, 163, 164, 165, 166, 167, 168, 169, 170, 171, 172, 173, 174, 175, 176, 177, 178, 179, 180, 181, 182, 183, 184, 185, 186, 187, 188, 189, 190, 191, 192, 193, 194, 195, 196, 197, 198, 199, 200, 201, 202, 203, 204, 205, 206, 207, 208, 209, 210, 211, 212, 213, 214, 215, 216, 217, 218, 219, 220, 221, 222, 223, 224, 225, 226, 227, 228, 229, 230, 231, 232, 233, 234, 235, 236, 237, 238, 239, 240, 241, 242, 243, 244, 245, 246, 247, 248, 249, 250, 251, 252, 253, 254, 255, 256, 257, 258, 259, 260, 261, 262, 263, 264, 265, 266, 267, 268, 269, 270, 271, 272, 273, 274, 275, 276, 277, 278, 279, 280, 281, 282, 283, 284, 285, 286, 287, 288, 289, 290, 291, 292, 293, 294, 295, 296, 297, 298, 299, 300, 301, 312, or 313, or a variant or derivative thereof; b) a polynucleotide comprising at least 60 consecutive nucleotides of any of a); and c) a polynucleotide complementary to the polynucleotide of any of a) through b).

[1265] The term “expression/expressing” or “gene expression” means the transcription of a specific gene or specific genes or specific genetic construct. The term “expression” or “gene expression” in particular means the transcription of a gene or genes or genetic construct into structural RNA (rRNA, tRNA) or mRNA with or without subsequent translation of the latter into a protein. The process includes transcription of DNA and processing of the resulting mRNA product.

[1266] To obtain the desired effect, i.e. plants that are tolerant or resistant to the PPO-inhibiting herbicide derivative herbicide of the present invention, it will be understood that the at least one nucleic acid is “over-expressed” by methods and means known to the person skilled in the art.

[1267] The term “increased expression” or “overexpression” as used herein means any form of expression that is additional to the original wild-type expression level. Methods for increasing expression of genes or gene products are well documented in the art and include, for example, overexpression driven by appropriate promoters, the use of transcription enhancers or translation enhancers. Isolated nucleic acids which serve as promoter or enhancer elements may be introduced in an appropriate position (typically upstream) of a non-heterologous form of a polynucleotide so as to upregulate expression of a nucleic acid encoding the polypeptide of interest. For example, endogenous promoters may be altered in vivo by mutation, deletion, and/or substitution (see, Kmiec, U.S. Pat. No. 5,565,350; Zarling et al., WO9322443), or isolated promoters may be introduced into a plant cell in the proper orientation and distance from a gene of the present invention so as to control the expression of the gene.

[1268] If polypeptide expression is desired, it is generally desirable to include a polyadenylation region at the 3′-end of a polynucleotide coding region. The polyadenylation region can be derived from the natural gene, from a variety of other plant genes, or from T-DNA. The 3′ end sequence to be added may be derived from, for example, the nopaline synthase or octopine synthase genes, or alternatively from another plant gene, or less preferably from any other eukaryotic gene.

[1269] An intron sequence may also be added to the 5′ untranslated region (UTR) or the coding sequence of the partial coding sequence to increase the amount of the mature message that accumulates in the cytosol. Inclusion of a spliceable intron in the transcription unit in both plant and animal expression constructs has been shown to increase gene expression at both the mRNA and protein levels up to 1000-fold (Buchman and Berg (1988) Mol. Cell biol. 8: 4395-4405; Callis et al. (1987) Genes Dev 1:1183-1200). Such intron enhancement of gene expression is typically greatest when placed near the 5′ end of the transcription unit. Use of the maize introns Adh1-5 intron 1, 2, and 6, the Bronze-1 intron are known in the art. For general information see: The Maize Handbook, Chapter 116, Freeling and Walbot, Eds., Springer, N.Y. (1994)

[1270] The term “introduction” or “transformation” as referred to herein encompasses the transfer of an exogenous polynucleotide into a host cell, irrespective of the method used for transfer. Plant tissue capable of subsequent clonal propagation, whether by organogenesis or embryogenesis, may be transformed with a genetic construct of the present invention and a whole plant regenerated there from. The particular tissue chosen will vary depending on the clonal propagation systems available for, and best suited to, the particular species being transformed. Exemplary tissue targets include leaf disks, pollen, embryos, cotyledons, hypocotyls, megagametophytes, callus tissue, existing meristematic tissue (e.g., apical meristem, axillary buds, and root meristems), and induced meristem tissue (e.g., cotyledon meristem and hypocotyl meristem). The polynucleotide may be transiently or stably introduced into a host cell and may be maintained non-integrated, for example, as a plasmid. Alternatively, it may be integrated into the host genome. The resulting transformed plant cell may then be used to regenerate a transformed plant in a manner known to persons skilled in the art.

[1271] The transfer of foreign genes into the genome of a plant is called transformation. Transformation of plant species is now a fairly routine technique. Advantageously, any of several transformation methods may be used to introduce the gene of interest into a suitable ancestor cell. The methods described for the transformation and regeneration of plants from plant tissues or plant cells may be utilized for transient or for stable transformation. Transformation methods include the use of liposomes, electroporation, chemicals that increase free DNA uptake, injection of the DNA directly into the plant, particle gun bombardment, transformation using viruses or pollen and microprojection. Methods may be selected from the calcium/polyethylene glycol method for protoplasts (Krens, F. A. et al., (1982) Nature 296, 72-74; Negrutiu I et al. (1987) Plant Mol Biol 8: 363-373); electroporation of protoplasts (Shillito R. D. et al. (1985) Bio/Technol 3, 1099-1102); microinjection into plant material (Crossway A et al., (1986) Mol. Gen Genet 202: 179-185); DNA or RNA-coated particle bombardment (Klein T Met al., (1987) Nature 327: 70) infection with (non-integrative) viruses and the like. Transgenic plants, including transgenic crop plants, are preferably produced via Agrobacterium-mediated transformation. An advantageous transformation method is the transformation in planta. To this end, it is possible, for example, to allow the agrobacteria to act on plant seeds or to inoculate the plant meristem with agrobacteria. It has proved particularly expedient in accordance with the invention to allow a suspension of transformed agrobacteria to act on the intact plant or at least on the flower primordia. The plant is subsequently grown on until the seeds of the treated plant are obtained (Clough and Bent, Plant J. (1998) 16, 735-743). Methods for Agrobacterium-mediated transformation of rice include well known methods for rice transformation, such as those described in any of the following: European patent application EP 1198985 A1, Aldemita and Hodges (Planta 199: 612-617, 1996); Chan et al. (Plant Mol Biol 22 (3): 491-506, 1993), Hiei et al. (Plant J 6 (2): 271-282, 1994), which disclosures are incorporated by reference herein as if fully set forth. In the case of corn transformation, the preferred method is as described in either Ishida et al. (Nat. Biotechnol 14(6): 745-50, 1996) or Frame et al. (Plant Physiol 129(1): 13-22, 2002), which disclosures are incorporated by reference herein as if fully set forth. Said methods are further described by way of example in B. Jenes et al., Techniques for Gene Transfer, in: Transgenic Plants, Vol. 1, Engineering and Utilization, eds. S. D. Kung and R. Wu, Academic Press (1993) 128-143 and in Potrykus Annu. Rev. Plant Physiol. Plant Molec. Biol. 42 (1991) 205-225). The nucleic acids or the construct to be expressed is preferably cloned into a vector, which is suitable for transforming Agrobacterium tumefaciens, for example pBin19 (Bevan et al., Nucl. Acids Res. 12 (1984) 8711). Agrobacteria transformed by such a vector can then be used in known manner for the transformation of plants, such as plants used as a model, like Arabidopsis (Arabidopsis thaliana is within the scope of the present invention not considered as a crop plant), or crop plants such as, by way of example, tobacco plants, for example by immersing bruised leaves or chopped leaves in an agrobacterial solution and then culturing them in suitable media. The transformation of plants by means of Agrobacterium tumefaciens is described, for example, by Hofgen and Willmitzer in Nucl. Acid Res. (1988) 16, 9877 or is known inter alia from F. F. White, Vectors for Gene Transfer in Higher Plants; in Transgenic Plants, Vol. 1, Engineering and Utilization, eds. S. D. Kung and R. Wu, Academic Press, 1993, pp. 15-38.

[1272] In addition to the transformation of somatic cells, which then have to be regenerated into intact plants, it is also possible to transform the cells of plant meristems and in particular those cells which develop into gametes. In this case, the transformed gametes follow the natural plant development, giving rise to transgenic plants. Thus, for example, seeds of Arabidopsis are treated with agrobacteria and seeds are obtained from the developing plants of which a certain proportion is transformed and thus transgenic [Feldman, K A and Marks M D (1987). Mol Gen Genet 208:274-289; Feldmann K (1992). In: C Koncz, N-H Chua and J Shell, eds, Methods in Arabidopsis Research. Word Scientific, Singapore, pp. 274-289]. Alternative methods are based on the repeated removal of the inflorescences and incubation of the excision site in the center of the rosette with transformed agrobacteria, whereby transformed seeds can likewise be obtained at a later point in time (Chang (1994). Plant J. 5: 551-558; Katavic (1994). Mol Gen Genet, 245: 363-370). However, an especially effective method is the vacuum infiltration method with its modifications such as the “floral dip” method. In the case of vacuum infiltration of Arabidopsis, intact plants under reduced pressure are treated with an agrobacterial suspension [Bechthold, N (1993). C R Acad Sci Paris Life Sci, 316: 1194-1199], while in the case of the “floral dip” method the developing floral tissue is incubated briefly with a surfactant-treated agrobacterial suspension [Clough, S J and Bent A F (1998) The Plant J. 16, 735-743]. A certain proportion of transgenic seeds are harvested in both cases, and these seeds can be distinguished from non-transgenic seeds by growing under the above-described selective conditions. In addition the stable transformation of plastids is of advantages because plastids are inherited maternally is most crops reducing or eliminating the risk of transgene flow through pollen. The transformation of the chloroplast genome is generally achieved by a process which has been schematically displayed in Klaus et al., 2004 [Nature Biotechnology 22 (2), 225-229]. Briefly the sequences to be transformed are cloned together with a selectable marker gene between flanking sequences homologous to the chloroplast genome. These homologous flanking sequences direct site specific integration into the plastome. Plastidal transformation has been described for many different plant species and an overview is given in Bock (2001) Transgenic plastids in basic research and plant biotechnology. J Mol Biol. 2001 Sep. 21; 312 (3):425-38 or Maliga, P (2003) Progress towards commercialization of plastid transformation technology. Trends Biotechnol. 21, 20-28. Further biotechnological progress has recently been reported in form of marker free plastid transformants, which can be produced by a transient co-integrated maker gene (Klaus et al., 2004, Nature Biotechnology 22(2), 225-229). The genetically modified plant cells can be regenerated via all methods with which the skilled worker is familiar. Suitable methods can be found in the abovementioned publications by S.D. Kung and R. Wu, Potrykus or Hofgen and Willmitzer.

[1273] Generally after transformation, plant cells or cell groupings are selected for the presence of one or more markers which are encoded by plant-expressible genes co-transferred with the gene of interest, following which the transformed material is regenerated into a whole plant. To select transformed plants, the plant material obtained in the transformation is, as a rule, subjected to selective conditions so that transformed plants can be distinguished from untransformed plants. For example, the seeds obtained in the above-described manner can be planted and, after an initial growing period, subjected to a suitable selection by spraying. A further possibility consists in growing the seeds, if appropriate after sterilization, on agar plates using a suitable selection agent so that only the transformed seeds can grow into plants. Alternatively, the transformed plants are screened for the presence of a selectable marker such as the ones described above.

[1274] Following DNA transfer and regeneration, putatively transformed plants may also be evaluated, for instance using Southern analysis, for the presence of the gene of interest, copy number and/or genomic organisation. Alternatively or additionally, expression levels of the newly introduced DNA may be monitored using Northern and/or Western analysis, both techniques being well known to persons having ordinary skill in the art.

[1275] The generated transformed plants may be propagated by a variety of means, such as by clonal propagation or classical breeding techniques. For example, a first generation (or T1) transformed plant may be selfed and homozygous second-generation (or T2) transformants selected, and the T2 plants may then further be propagated through classical breeding techniques. The generated transformed organisms may take a variety of forms. For example, they may be chimeras of transformed cells and non-transformed cells; clonal transformants (e.g., all cells transformed to contain the expression cassette); grafts of transformed and untransformed tissues (e.g., in plants, a transformed rootstock grafted to an untransformed scion).

[1276] Preferably, the wild-type or mutated PPO nucleic acid comprises a polynucleotide sequence selected from the group consisting of: a) a polynucleotide encoding a polypeptide as shown in SEQ ID NO: 1, 2, 3, 4, 5, 6, 7, 8, 9, 10, 11, 12, 13, 14, 15, 16, 17, 18, 19, 20, 21, 22, 23, 24, 25, 26, 27, 28, 29, 30, 31, 32, 33, 34, 35, 36, 37, 38, 39, 40, 41, 42, 43, 44, 45, 46, 47, 48, 49, 50, 51, 52, 53, 54, 55, 56, 57, 58, 59, 60, 61, 62, 63, 64, 65, 66, 67, 68, 69, 70, 71, 72, 73, 74, 75, 76, 77, 78, 79, 80, 81, 82, 83, 84, 85, 86, 87, 88, 89, 90, 91, 92, 93, 94, 95, 96, 97, 98, 99, 100, 101, 102, 103, 104, 105, 106, 107, 108, 109, 110, 111, 112, 113, 114, 115, 116, 117, 118, 119, 120, 121, 122, 123, 124, 125, 126, 127, 128, 129, 130, 131, 132, 133, 134, 135, 136, 137, 138, 139, 140, 141, 142, 143, 144, 145, 146, 147, 148, 149, 150, 151, 152, 153, 154, 155, 156, 157, 158, 159, 160, 161, 162, 163, 164, 165, 166, 167, 168, 169, 170, 171, 172, 173, 174, 175, 176, 177, 178, 179, 180, 181, 182, 183, 184, 185, 186, 187, 188, 189, 190, 191, 192, 193, 194, 195, 196, 197, 198, 199, 200, 201, 202, 203, 204, 205, 206, 207, 208, 209, 210, 211, 212, 213, 214, 215, 216, 217, 218, 219, 220, 221, 222, 223, 224, 225, 226, 227, 228, 229, 230, 231, 232, 233, 234, 235, 236, 237, 238, 239, 240, 241, 242, 243, 244, 245, 246, 247, 248, 249, 250, 251, 252, 253, 254, 255, 256, 257, 258, 259, 260, 261, 262, 263, 264, 265, 266, 267, 268, 269, 270, 271, 272, 273, 274, 275, 276, 277, 278, 279, 280, 281, 282, 283, 284, 285, 286, 287, 288, 289, 290, 291, 292, 293, 294, 295, 296, 297, 298, 299, 300, 301, 312, or 313, or a variant or derivative thereof; b) a polynucleotide comprising at least 60 consecutive nucleotides of any of a); and c) a polynucleotide complementary to the polynucleotide of any of a) through b).

[1277] Preferably, the expression of the nucleic acid in the plant results in the plant's increased resistance to PPO-inhibiting herbicide as compared to a wild type variety of the plant.

[1278] In another embodiment, the invention refers to a plant, preferably a transgenic plant, comprising a plant cell according to the present invention, wherein expression of the nucleic acid in the plant results in the plant's increased resistance to PPO-inhibiting herbicide as compared to a wild type variety of the plant.

[1279] The plants described herein can be either transgenic crop plants or non-transgenic plants.

[1280] For the purposes of the invention, “transgenic”, “transgene” or “recombinant” means with regard to, for example, a nucleic acid sequence, an expression cassette, gene construct or a vector comprising the nucleic acid sequence or an organism transformed with the nucleic acid sequences, expression cassettes or vectors according to the invention, all those constructions brought about by recombinant methods in which either
[1281] (a) the nucleic acid sequences encoding proteins useful in the methods of the invention, or
[1282] (b) genetic control sequence(s) which is operably linked with the nucleic acid sequence according to the invention, for example a promoter, or
[1283] (c) a) and b)

[1284] are not located in their natural genetic environment or have been modified by recombinant methods, it being possible for the modification to take the form of, for example, a substitution, addition, deletion, inversion or insertion of one or more nucleotide residues in order to allow for the expression of the mutated PPO of the present invention. The natural genetic environment is understood as meaning the natural genomic or chromosomal locus in the original plant or the presence in a genomic library. In the case of a genomic library, the natural genetic environment of the nucleic acid sequence is preferably retained, at least in part. The environment flanks the nucleic acid sequence at least on one side and has a sequence length of at least 50 bp, preferably at least 500 bp, especially preferably at least 1000 bp, most preferably at least 5000 bp. A naturally occurring expression cassette—for example the naturally occurring combination of the natural promoter of the nucleic acid sequences with the corresponding nucleic acid sequence encoding a polypeptide useful in the methods of the present invention, as defined above—becomes a transgenic expression cassette when this expression cassette is modified by non-natural, synthetic (“artificial”) methods such as, for example, mutagenic treatment. Suitable methods are described, for example, in U.S. Pat. No. 5,565,350 or WO 00/15815.

[1285] A transgenic plant for the purposes of the invention is thus understood as meaning, as above, that the nucleic acids of the invention are not at their natural locus in the genome of said plant, it being possible for the nucleic acids to be expressed homologously or heterologously. However, as mentioned, transgenic also means that, while the nucleic acids according to the invention or used in the inventive method are at their natural position in the genome of a plant, the sequence has been modified with regard to the natural sequence, and/or that the regulatory sequences of the natural sequences have been modified. Transgenic is preferably understood as meaning the expression of the nucleic acids according to the invention at an unnatural locus in the genome, i.e. homologous or, preferably, heterologous expression of the nucleic acids takes place. Preferred transgenic plants are mentioned herein. Furthermore, the term “transgenic” refers to any plant, plant cell, callus, plant tissue, or plant part, that contains all or part of at least one recombinant polynucleotide. In many cases, all or part of the recombinant polynucleotide is stably integrated into a chromosome or stable extra-chromosomal element, so that it is passed on to successive generations. For the purposes of the invention, the term “recombinant polynucleotide” refers to a polynucleotide that has been altered, rearranged, or modified by genetic engineering. Examples include any cloned polynucleotide, or polynucleotides, that are linked or joined to heterologous sequences. The term “recombinant” does not refer to alterations of polynucleotides that result from naturally occurring events, such as spontaneous mutations, or from non-spontaneous mutagenesis followed by selective breeding.

[1286] Plants containing mutations arising due to non-spontaneous mutagenesis and selective breeding are referred to herein as non-transgenic plants and are included in the present invention. In embodiments wherein the plant is transgenic and comprises multiple mutated PPO nucleic acids, the nucleic acids can be derived from different genomes or from the same genome. Alternatively, in embodiments wherein the plant is non-transgenic and comprises multiple mutated PPO nucleic acids, the nucleic acids are located on different genomes or on the same genome. As used herein, “mutagenized” refers to an organism or DNA thereof having alteration(s) in the biomolecular sequence of its native genetic material as compared to the sequence of the genetic material of a corresponding wild-type organism or DNA, wherein the alteration(s) in genetic material were induce and/or selected by human action. Methods of inducing mutations can induce mutations in random positions in the genetic material or can induce mutations in specific locations in the genetic material (i.e., can be directed mutagenesis techniques), such as by use of a genoplasty technique.

[1287] In certain embodiments, the present invention involves herbidicide-resistant plants that are produced by mutation breeding. Such plants comprise a polynucleotide encoding a mutated PPO and are tolerant to one or more PPO-inhibiting herbicides. Such methods can involve, for example, exposing the plants or seeds to a mutagen, particularly a chemical mutagen such as, for example, ethyl methanesulfonate (EMS) and selecting for plants that have enhanced tolerance to at least one or more PPO-inhibiting herbicide.

[1288] However, the present invention is not limited to herbicide-tolerant plants that are produced by a mutagenesis method involving the chemical mutagen EMS. Any mutagenesis method known in the art may be used to produce the herbicide-resistant plants of the present invention. Such mutagenesis methods can involve, for example, the use of any one or more of the following mutagens: radiation, such as X-rays, Gamma rays (e.g., cobalt 60 or cesium 137), neutrons, (e.g., product of nuclear fission by uranium 235 in an atomic reactor), Beta radiation (e.g., emitted from radioisotopes such as phosphorus 32 or carbon 14), and ultraviolet radiation (preferably from 2500 to 2900 nm), and chemical mutagens such as base analogues (e.g., 5-bromo-uracil), related compounds (e.g., 8-ethoxy caffeine), antibiotics (e.g., streptonigrin), alkylating agents (e.g., sulfur mustards, nitrogen mustards, epoxides, ethylenamines, sulfates, sulfonates, sulfones, lactones), azide, hydroxylamine, nitrous acid, or acridines. Herbicide-resistant plants can also be produced by using tissue culture methods to select for plant cells comprising herbicide-resistance mutations and then regenerating herbicide-resistant plants therefrom. See, for example, U.S. Pat. Nos. 5,773,702 and 5,859,348, both of which are herein incorporated in their entirety by reference. Further details of mutation breeding can be found in “Principals of Cultivar Development” Fehr, 1993 Macmillan Publishing Company the disclosure of which is incorporated herein by reference

[1289] In addition to the definition above, the term “plant” is intended to encompass crop plants at any stage of maturity or development, as well as any tissues or organs (plant parts) taken or derived from any such plant unless otherwise clearly indicated by context. Plant parts include, but are not limited to, stems, roots, flowers, ovules, stamens, leaves, embryos, meristematic regions, callus tissue, anther cultures, gametophytes, sporophytes, pollen, microspores, protoplasts, and the like.

[1290] The plant of the present invention comprises at least one mutated PPO nucleic acid or over-expressed wild-type PPO nucleic acid, and has increased tolerance to a PPO-inhibiting herbicide as compared to a wild-type variety of the plant. It is possible for the plants of the present invention to have multiple wild-type or mutated PPO nucleic acids from different genomes since these plants can contain more than one genome. For example, a plant contains two genomes, usually referred to as the A and B genomes. Because PPO is a required metabolic enzyme, it is assumed that each genome has at least one gene coding for the PPO enzyme (i.e. at least one PPO gene). As used herein, the term “PPO gene locus” refers to the position of an PPO gene on a genome, and the terms “PPO gene” and “PPO nucleic acid” refer to a nucleic acid encoding the PPO enzyme. The PPO nucleic acid on each genome differs in its nucleotide sequence from an PPO nucleic acid on another genome. One of skill in the art can determine the genome of origin of each PPO nucleic acid through genetic crossing and/or either sequencing methods or exonuclease digestion methods known to those of skill in the art.

[1291] The present invention includes plants comprising one, two, three, or more mutated PPO alleles, wherein the plant has increased tolerance to a PPO-inhibiting herbicide as compared to a wild-type variety of the plant. The mutated PPO alleles can comprise a nucleotide sequence selected from the group consisting of a polynucleotide encoding a polypeptide as defined in SEQ ID NO: 1, 2, 3, 4, 5, 6, 7, 8, 9, 10, 11, 12, 13, 14, 15, 16, 17, 18, 19, 20, 21, 22, 23, 24, 25, 26, 27, 28, 29, 30, 31, 32, 33, 34, 35, 36, 37, 38, 39, 40, 41, 42, 43, 44, 45, 46, 47, 48, 49, 50, 51, 52, 53, 54, 55, 56, 57, 58, 59, 60, 61, 62, 63, 64, 65, 66, 67, 68, 69, 70, 71, 72, 73, 74, 75, 76, 77, 78, 79, 80, 81, 82, 83, 84, 85, 86, 87, 88, 89, 90, 91, 92, 93, 94, 95, 96, 97, 98, 99, 100, 101, 102, 103, 104, 105, 106, 107, 108, 109, 110, 111, 112, 113, 114, 115, 116, 117, 118, 119, 120, 121, 122, 123, 124, 125, 126, 127, 128, 129, 130, 131, 132, 133, 134, 135, 136, 137, 138, 139, 140, 141, 142, 143, 144, 145, 146, 147, 148, 149, 150, 151, 152, 153, 154, 155, 156, 157, 158, 159, 160, 161, 162, 163, 164, 165, 166, 167, 168, 169, 170, 171, 172, 173, 174, 175, 176, 177, 178, 179, 180, 181, 182, 183, 184, 185, 186, 187, 188, 189, 190, 191, 192, 193, 194, 195, 196, 197, 198, 199, 200, 201, 202, 203, 204, 205, 206, 207, 208, 209, 210, 211, 212, 213, 214, 215, 216, 217, 218, 219, 220, 221, 222, 223, 224, 225, 226, 227, 228, 229, 230, 231, 232, 233, 234, 235, 236, 237, 238, 239, 240, 241, 242, 243, 244, 245, 246, 247, 248, 249, 250, 251, 252, 253, 254, 255, 256, 257, 258, 259, 260, 261, 262, 263, 264, 265, 266, 267, 268, 269, 270, 271, 272, 273, 274, 275, 276, 277, 278, 279, 280, 281, 282, 283, 284, 285, 286, 287, 288, 289, 290, 291, 292, 293, 294, 295, 296, 297, 298, 299, 300, 301, 312, or 313, or a variant or derivative, homologue, orthologue, paralogue thereof, a polynucleotide comprising at least 60 consecutive nucleotides of any of the aforementioned polynucleotides; and a polynucleotide complementary to any of the aforementioned polynucleotides.

[1292] “Alleles” or “allelic variants” are alternative forms of a given gene, located at the same chromosomal position. Allelic variants encompass Single Nucleotide Polymorphisms (SNPs), as well as Small Insertion/Deletion Polymorphisms (INDELs). The size of INDELs is usually less than 100 bp. SNPs and INDELs form the largest set of sequence variants in naturally occurring polymorphic strains of most organisms

[1293] The term “variety” refers to a group of plants within a species defined by the sharing of a common set of characteristics or traits accepted by those skilled in the art as sufficient to distinguish one cultivar or variety from another cultivar or variety. There is no implication in either term that all plants of any given cultivar or variety will be genetically identical at either the whole gene or molecular level or that any given plant will be homozygous at all loci. A cultivar or variety is considered “true breeding” for a particular trait if, when the true-breeding cultivar or variety is self-pollinated, all of the progeny contain the trait. The terms “breeding line” or “line” refer to a group of plants within a cultivar defined by the sharing of a common set of characteristics or traits accepted by those skilled in the art as sufficient to distinguish one breeding line or line from another breeding line or line. There is no implication in either term that all plants of any given breeding line or line will be genetically identical at either the whole gene or molecular level or that any given plant will be homozygous at all loci. A breeding line or line is considered “true breeding” for a particular trait if, when the true-breeding line or breeding line is self-pollinated, all of the progeny contain the trait. In the present invention, the trait arises from a mutation in a PPO gene of the plant or seed.

[1294] In some embodiments, traditional plant breeding is employed whereby the PPO-inhibiting herbicides-tolerant trait is introduced in the progeny plant resulting therefrom. In one embodiment, the present invention provides a method for producing a PPO-inhibiting herbicides-tolerant progeny plant, the method comprising: crossing a parent plant with a PPO-inhibiting herbicides-tolerant plant to introduce the PPO-inhibiting herbicides-tolerance characteristics of the PPO-inhibiting herbicides-tolerant plant into the germplasm of the progeny plant, wherein the progeny plant has increased tolerance to the PPO-inhibiting herbicides relative to the parent plant. In other embodiments, the method further comprises the step of introgressing the PPO-inhibiting herbicides-tolerance characteristics through traditional plant breeding techniques to obtain a descendent plant having the PPO-inhibiting herbicides-tolerance characteristics.

[1295] The herbicide-resistant plants of the invention that comprise polynucleotides encoding mutated PPO polypeptides also find use in methods for increasing the herbicide-resistance of a plant through conventional plant breeding involving sexual reproduction. The methods comprise crossing a first plant that is a herbicide-resistant plant of the invention to a second plant that may or may not be resistant to the same herbicide or herbicides as the first plant or may be resistant to different herbicide or herbicides than the first plant. The second plant can be any plant that is capable of producing viable progeny plants (i.e., seeds) when crossed with the first plant. Typically, but not necessarily, the first and second plants are of the same species. The methods can optionally involve selecting for progeny plants that comprise the mutated PPO polypeptides of the first plant and the herbicide resistance characteristics of the second plant. The progeny plants produced by this method of the present invention have increased resistance to a herbicide when compared to either the first or second plant or both. When the first and second plants are resistant to different herbicides, the progeny plants will have the combined herbicide tolerance characteristics of the first and second plants. The methods of the invention can further involve one or more generations of backcrossing the progeny plants of the first cross to a plant of the same line or genotype as either the first or second plant. Alternatively, the progeny of the first cross or any subsequent cross can be crossed to a third plant that is of a different line or genotype than either the first or second plant. The present invention also provides plants, plant organs, plant tissues, plant cells, seeds, and non-human host cells that are transformed with the at least one polynucleotide molecule, expression cassette, or transformation vector of the invention. Such transformed plants, plant organs, plant tissues, plant cells, seeds, and non-human host cells have enhanced tolerance or resistance to at least one herbicide, at levels of the herbicide that kill or inhibit the growth of an untransformed plant, plant tissue, plant cell, or non-human host cell, respectively. Preferably, the transformed plants, plant tissues, plant cells, and seeds of the invention are Arabidopsis thaliana and crop plants.

[1296] In other aspects, plants of the invention include those plants which, in addition to being tolerant to PPO-inhibiting herbicides, have been subjected to further genetic modifications by breeding, mutagenesis or genetic engineering, e.g. have been rendered tolerant to applications of specific other classes of herbicides, such as AHAS inhibitors; auxinic herbicides; bleaching herbicides such as hydroxyphenylpyruvate dioxygenase (HPPD) inhibitors or phytoene desaturase (PDS) inhibitors; EPSPS inhibitors such as glyphosate; glutamine synthetase (GS) inhibitors such as glufosinate; lipid biosynthesis inhibitors such as acetyl CoA carboxylase (ACCase) inhibitors; or oxynil {i.e. bromoxynil or ioxynil) herbicides as a result of conventional methods of breeding or genetic engineering, Thus, PPO-inhibiting herbicides-tolerant plants of the invention can be made resistant to multiple classes of herbicides through multiple genetic modifications, such as resistance to both glyphosate and glufosinate or to both glyphosate and a herbicide from another class such as HPPD inhibitors, AHAS inhibitors, or ACCase inhibitors. These herbicide resistance technologies are, for example, described in Pest Management Science (at volume, year, page): 61, 2005, 246; 61, 2005, 258; 61, 2005, 277; 61, 2005, 269; 61, 2005, 286; 64, 2008, 326; 64, 2008, 332; Weed Science 57, 2009, 108; Australian Journal of Agricultural Research 58, 2007, 708; Science 316, 2007, 1185; and references quoted therein. For example, PPO-inhibiting herbicides-tolerant plants of the invention, in some embodiments, may be tolerant to ACCase inhibitors, such as “dims” {e.g., cycloxydim, sethoxydim, clethodim, or tepraloxydim), “fops” {e.g., clodinafop, diclofop, fluazifop, haloxyfop, or quizalofop), and “dens” (such as pinoxaden); to auxinic herbicides, such as dicamba; to EPSPS inhibitors, such as glyphosate; to other PPO inhibitors; and to GS inhibitors, such as glufosinate.

[1297] In addition to these classes of inhibitors, PPO-inhibiting herbicides-tolerant plants of the invention may also be tolerant to herbicides having other modes of action, for example, chlorophyll/carotenoid pigment inhibitors, cell membrane disrupters, photosynthesis inhibitors, cell division inhibitors, root inhibitors, shoot inhibitors, and combinations thereof.

[1298] Such tolerance traits may be expressed, e.g.: as mutant or wildtype PPO proteins, as mutant AHASL proteins, mutant ACCase proteins, mutant EPSPS proteins, or mutant glutamine synthetase proteins; or as mutant native, inbred, or transgenic aryloxyalkanoate dioxygenase (AAD or DHT), haloarylnitrilase (BXN), 2,2-dichloropropionic acid dehalogenase (DEH), glyphosate-N-acetyltransferase (GAT), glyphosate decarboxylase (GDC), glyphosate oxidoreductase (GOX), glutathione-S-transferase (GST), phosphinothricin acetyltransferase (PAT or bar), or CYP450s proteins having an herbicide-degrading activity.

[1299] PPO-inhibiting herbicides-tolerant plants hereof can also be stacked with other traits including, but not limited to, pesticidal traits such as Bt Cry and other proteins having pesticidal activity toward coleopteran, lepidopteran, nematode, or other pests; nutrition or nutraceutical traits such as modified oil content or oil profile traits, high protein or high amino acid concentration traits, and other trait types known in the art.

[1300] Furthermore, in other embodiments, PPO-inhibiting herbicides-tolerant plants are also covered which are, by the use of recombinant DNA techniques and/or by breeding and/or otherwise selected for such characteristics, rendered able to synthesize one or more insecticidal proteins, especially those known from the bacterial genus Bacillus, particularly from Bacillus thuringiensis, such as [delta]-endotoxins, e.g. CryIA(b), CryIA(c), CryIF, CryIF(a2), CryIIA(b), CryIIIA, CryIIIB(bl) or Cry9c; vegetative insecticidal proteins (VIP), e.g. VIP1, VIP2, VIP3 or VIP3A; insecticidal proteins of bacteria colonizing nematodes, e.g. Photorhabdus spp. or Xenorhabdus spp.; toxins produced by animals, such as scorpion toxins, arachnid toxins, wasp toxins, or other insect-specific neurotoxins; toxins produced by fungi, such streptomycete toxins; plant lectins, such as pea or barley lectins; agglutinins; proteinase inhibitors, such as trypsin inhibitors, serine protease inhibitors, patatin, cystatin or papain inhibitors; ribosome-inactivating proteins (RIP), such as ricin, maize-RIP, abrin, luffin, saporin or bryodin; steroid metabolism enzymes, such as 3-hydroxy-steroid oxidase, ecdysteroid-IDP-glycosyl-transferase, cholesterol oxidases, ecdysone inhibitors or HMG-CoA-reductase; ion channel blockers, such as blockers of sodium or calcium channels; juvenile hormone esterase; diuretic hormone receptors (helicokinin receptors); stilben synthase, bibenzyl synthase, chitinases or glucanases. In the context of the present invention these insecticidal proteins or toxins are to be understood expressly also as pre-toxins, hybrid proteins, truncated or otherwise modified proteins. Hybrid proteins are characterized by a new combination of protein domains, (see, e.g. WO 02/015701). Further examples of such toxins or genetically modified plants capable of synthesizing such toxins are disclosed, e.g., in EP-A 374 753, WO 93/007278, WO 95/34656, EP-A 427 529, EP-A 451 878, WO 03/18810 and WO 03/52073. The methods for producing such genetically modified plants are generally known to the person skilled in the art and are described, e.g. in the publications mentioned above. These insecticidal proteins contained in the genetically modified plants impart to the plants producing these proteins tolerance to harmful pests from all taxonomic groups of arthropods, especially to beetles (Coeloptera), two-winged insects (Diptera), and moths (Lepidoptera) and to nematodes (Nematoda).

[1301] In some embodiments, expression of one or more protein toxins (e.g., insecticidal proteins) in the PPO-inhibiting herbicides-tolerant plants is effective for controlling organisms that include, for example, members of the classes and orders: Coleoptera such as the American bean weevil Acanthoscelides obtectus; the leaf beetle Agelastica alni; click beetles (Agriotes lineatus, Agriotes obscurus, Agriotes bicolor); the grain beetle Ahasverus advena; the summer schafer Amphimallon solstitialis; the furniture beetle Anobium punctatum; Anthonomus spp. (weevils); the Pygmy mangold beetle Atomaria linearis; carpet beetles (Anthrenus spp., Attagenus spp.); the cowpea weevil Callosobruchus maculates; the fried fruit beetle Carpophilus hemipterus; the cabbage seedpod weevil Ceutorhynchus assimilis; the rape winter stem weevil Ceutorhynchus picitarsis; the wireworms Conoderus vespertinus and Conoderus falli; the banana weevil Cosmopolites sordidus; the New Zealand grass grub Costelytra zealandica; the June beetle Cotinis nitida; the sunflower stem weevil Cylindrocopturus adspersus; the larder beetle Dermestes lardarius; the corn rootworms Diabrotica virgifera, Diabrotica virgifera virgifera, and Diabrotica barberi; the Mexican bean beetle Epilachna varivestis; the old house borer Hylotropes bajulus; the lucerne weevil Hypera postica; the shiny spider beetle Gibbium psylloides; the cigarette beetle Lasioderma serricorne; the Colorado potato beetle Leptinotarsa decemlineata; Lyctus beetles {Lyctus spp., the pollen beetle Meligethes aeneus; the common cockshafer Melolontha melolontha; the American spider beetle Mezium americanum; the golden spider beetle Niptus hololeucs; the grain beetles Oryzaephilus surinamensis and Oryzaephilus Mercator; the black vine weevil Otiorhynchus sulcatus; the mustard beetle Phaedon cochleariae, the crucifer flea beetle Phyllotreta cruciferae; the striped flea beetle Phyllotreta striolata; the cabbage steam flea beetle Psylliodes chrysocephala; Ptinus spp. (spider beetles); the lesser grain borer Rhizopertha dominica; the pea and been weevil Sitona lineatus; the rice and granary beetles Sitophilus oryzae and Sitophilus granaries; the red sunflower seed weevil Smicronyx fulvus; the drugstore beetle Stegobium paniceum; the yellow mealworm beetle Tenebrio molitor, the flour beetles Tribolium castaneum and Tribolium confusum; warehouse and cabinet beetles {Trogoderma spp.); the sunflower beetle Zygogramma exclamationis; Dermaptera (earwigs) such as the European earwig Forficula auricularia and the striped earwig Labidura riparia; Dictyoptera such as the oriental cockroach Blatta orientalis; the greenhouse millipede Oxidus gracilis; the beet fly Pegomyia betae; the frit fly Oscinella frit; fruitflies (Dacus spp., Drosophila spp.); Isoptera (termites) including species from the families Hodotermitidae, Kalotermitidae, Mastotermitidae, Rhinotermitidae, Serritermitidae, Termitidae, Termopsidae; the tarnished plant bug Lygus lineolaris; the black bean aphid Aphis fabae; the cotton or melon aphid Aphis gossypii; the green apple aphid Aphis pomi; the citrus spiny whitefly Aleurocanthus spiniferus; the sweet potato whitefly Bemesia tabaci; the cabbage aphid Brevicoryne brassicae; the pear psylla Cacopsylla pyricola; the currant aphid Cryptomyzus ribis; the grape phylloxera Daktulosphaira vitifoliae; the citrus psylla Diaphorina citri; the potato leafhopper Empoasca fabae; the bean leafhopper Empoasca Solana; the vine leafhopper Empoasca vitis; the woolly aphid Eriosoma lanigerum; the European fruit scale Eulecanium corni; the mealy plum aphid Hyalopterus arundinis; the small brown planthopper Laodelphax striatellus; the potato aphid Macrosiphum euphorbiae; the green peach aphid Myzus persicae; the green rice leafhopper Nephotettix cinticeps; the brown planthopper Nilaparvata lugens; the hop aphid Phorodon humuli; the bird-cherry aphid Rhopalosiphum padi; the grain aphid Sitobion avenae; Lepidoptera such as Adoxophyes orana (summer fruit tortrix moth); Archips podana (fruit tree tortrix moth); Bucculatrix pyrivorella (pear leafminer); Bucculatrix thurberiella (cotton leaf perforator); Bupalus piniarius (pine looper); Carpocapsa pomonella (codling moth); Chilo suppressalis (striped rice borer); Choristoneura fumiferana (eastern spruce budworm); Cochylis hospes (banded sunflower moth); Diatraea grandiosella (southwestern corn borer); Eupoecilia ambiguella (European grape berry moth); Helicoverpa armigera (cotton bollworm); Helicoverpa zea (cotton bollworm); Heliothis vires cens (tobacco budworm), Homeosoma electellum (sunflower moth); Homona magnanima (oriental tea tree tortrix moth); Lithocolletis blancardella (spotted tentiform leafminer); Lymantria dispar (gypsy moth); Malacosoma neustria (tent caterpillar); Mamestra brassicae (cabbage armyworm); Mamestra configurata (Bertha armyworm); Operophtera brumata (winter moth); Ostrinia nubilalis (European corn borer), Panolis flammea (pine beauty moth), Phyllocnistis citrella (citrus leafminer); Pieris brassicae (cabbage white butterfly); Rachiplusia ni (soybean looper); Spodoptera exigua (beet armywonn); Spodoptera littoralis (cotton leafworm); Sylepta derogata (cotton leaf roller); Trichoplusia ni (cabbage looper); Orthoptera such as the common cricket Acheta domesticus, tree locusts (Anacridium spp.), the migratory locust Locusta migratoria, the twostriped grasshopper Melanoplus bivittatus, the differential grasshopper Melanoplus differ entialis, the redlegged grasshopper Melanoplus femurrubrum, the migratory grasshopper Melanoplus sanguinipes, the northern mole cricket Neocurtilla hexadectyla, the red locust Nomadacris septemfasciata, the shortwinged mole cricket Scapteriscus abbreviatus, the southern mole cricket Scapteriscus borellii, the tawny mole cricket Scapteriscus vicinus, and the desert locust Schistocerca gregaria; Symphyla such as the garden symphylan Scutigerella immaculata; Thysanoptera such as the tobacco thrips Frankliniella fusca, the flower thrips Frankliniella intonsa, the western flower thrips Frankliniella occidentalism the cotton bud thrips Frankliniella schultzei, the banded greenhouse thrips Hercinothrips femoralis, the soybean thrips Neohydatothrips variabilis, Kelly's citrus thrips Pezothrips kellyanus, the avocado thrips Scirtothrips perseae, the melon thrips Thrips palmi, and the onion thrips Thrips tabaci; and the like, and combinations comprising one or more of the foregoing organisms.

[1302] In some embodiments, expression of one or more protein toxins (e.g., insecticidal proteins) in the PPO-inhibiting herbicides-tolerant plants is effective for controlling flea beetles, i.e. members of the flea beetle tribe of family Chrysomelidae, preferably against Phyllotreta spp., such as Phyllotreta cruciferae and/or Phyllotreta triolata. In other embodiments, expression of one or more protein toxins {e.g., insecticidal proteins) in the PPO-inhibiting herbicides-tolerant plants is effective for controlling cabbage seedpod weevil, the Bertha armyworm, Lygus bugs, or the diamondback moth.

[1303] Furthermore, in one embodiment, PPO-inhibiting herbicides-tolerant plants are also covered which are, e.g. by the use of recombinant DNA techniques and/or by breeding and/or otherwise selected for such traits, rendered able to synthesize one or more proteins to increase the resistance or tolerance of those plants to bacterial, viral or fungal pathogens. The methods for producing such genetically modified plants are generally known to the person skilled in the art.

[1304] Furthermore, in another embodiment, PPO-inhibiting herbicides-tolerant plants are also covered which are, e.g. by the use of recombinant DNA techniques and/or by breeding and/or otherwise selected for such traits, rendered able to synthesize one or more proteins to increase the productivity (e.g. oil content), tolerance to drought, salinity or other growth-limiting environmental factors or tolerance to pests and fungal, bacterial or viral pathogens of those plants.

[1305] Furthermore, in other embodiments, PPO-inhibiting herbicides-tolerant plants are also covered which are, e.g. by the use of recombinant DNA techniques and/or by breeding and/or otherwise selected for such traits, altered to contain a modified amount of one or more substances or new substances, for example, to improve human or animal nutrition, e.g. oil crops that produce health-promoting long-chain omega-3 fatty acids or unsaturated omega-9 fatty acids (e.g. Nexera(R) rape, Dow Agro Sciences, Canada).

[1306] Furthermore, in some embodiments, PPO-inhibiting herbicides-tolerant plants are also covered which are, e.g. by the use of recombinant DNA techniques and/or by breeding and/or otherwise selected for such traits, altered to contain increased amounts of vitamins and/or minerals, and/or improved profiles of nutraceutical compounds.

[1307] In one embodiment, PPO-inhibiting herbicides-tolerant plants of the present invention, relative to a wild-type plant, comprise an increased amount of, or an improved profile of, a compound selected from the group consisting of: glucosinolates (e.g., glucoraphanin (4-methylsulfinylbutyl-glucosinolate), sulforaphane, 3-indolylmethyl-glucosinolate(glucobrassicin), I-methoxy-3-indolylmethyl-glucosinolate (neoglucobrassicin)); phenolics (e.g., flavonoids (e.g., quercetin, kaempferol), hydroxycinnamoyl derivatives (e.g., 1,2,2′-trisinapoylgentiobiose, 1,2-diferuloylgentiobiose, I,2′-disinapoyl-2-feruloylgentiobiose, 3-0-caffeoyl-quinic (neochlorogenic acid)); and vitamins and minerals (e.g., vitamin C, vitamin E, carotene, folic acid, niacin, riboflavin, thiamine, calcium, iron, magnesium, potassium, selenium, and zinc).

[1308] In another embodiment, PPO-inhibiting herbicides-tolerant plants of the present invention, relative to a wild-type plant, comprise an increased amount of, or an improved profile of, a compound selected from the group consisting of: progoitrin; isothiocyanates; indoles (products of glucosinolate hydrolysis); glutathione; carotenoids such as beta-carotene, lycopene, and the xanthophyll carotenoids such as lutein and zeaxanthin; phenolics comprising the flavonoids such as the flavonols (e.g. quercetin, rutin), the flavans/tannins (such as the procyanidins comprising coumarin, proanthocyanidins, catechins, and anthocyanins); flavones; phytoestrogens such as coumestans, lignans, resveratrol, isoflavones e.g. genistein, daidzein, and glycitein; resorcyclic acid lactones; organosulphur compounds; phytosterols; terpenoids such as carnosol, rosmarinic acid, glycyrrhizin and saponins; chlorophyll; chlorphyllin, sugars, anthocyanins, and vanilla. In other embodiments, PPO-inhibiting herbicides-tolerant plants of the present invention, relative to a wild-type plant, comprise an increased amount of, or an improved profile of, a compound selected from the group consisting of: vincristine, vinblastine, taxanes (e.g., taxol (paclitaxel), baccatin III, 10-desacetylbaccatin III, 10-desacetyl taxol, xylosyl taxol, 7-epitaxol, 7-epibaccatin III, 10-desacetylcephalomannine, 7-epicephalomannine, taxotere, cephalomannine, xylosyl cephalomannine, taxagifine, 8-benxoyloxy taxagifine, 9-acetyloxy taxusin, 9-hydroxy taxusin, taiwanxam, taxane la, taxane Ib, taxane Ic, taxane Id, GMP paclitaxel, 9-dihydro 13-acetylbaccatin III, 10-desacetyl-7-epitaxol, tetrahydrocannabinol (THC), cannabidiol (CBD), genistein, diadzein, codeine, morphine, quinine, shikonin, ajmalacine, serpentine, and the like.

[1309] It is to be understood that the plant of the present invention can comprise a wild type PPO nucleic acid in addition to a mutated PPO nucleic acid. It is contemplated that the PPO-inhibiting herbicide tolerant lines may contain a mutation in only one of multiple PPO isoenzymes. Therefore, the present invention includes a plant comprising one or more mutated PPO nucleic acids in addition to one or more wild type PPO nucleic acids.

[1310] In another embodiment, the invention refers to a seed produced by a transgenic plant comprising a plant cell of the present invention, wherein the seed is true breeding for an increased resistance to a PPO-inhibiting herbicide as compared to a wild type variety of the seed.

[1311] In another embodiment, the invention refers to a method of producing a transgenic plant cell with an increased resistance to a PPO-inhibiting herbicide as compared to a wild type variety of the plant cell comprising, transforming the plant cell with an expression cassette comprising a mutated PPO nucleic acid.

[1312] In another embodiment, the invention refers to a method of producing a transgenic plant comprising, (a) transforming a plant cell with an expression cassette comprising a mutated PPO nucleic acid, and (b) generating a plant with an increased resistance to PPO-inhibiting herbicide from the plant cell.

[1313] Consequently, mutated PPO nucleic acids of the invention are provided in expression cassettes for expression in the plant of interest. The cassette will include regulatory sequences operably linked to a mutated PPO nucleic acid sequence of the invention. The term “regulatory element” as used herein refers to a polynucleotide that is capable of regulating the transcription of an operably linked polynucleotide. It includes, but not limited to, promoters, enhancers, introns, 5′ UTRs, and 3′ UTRs. By “operably linked” is intended a functional linkage between a promoter and a second sequence, wherein the promoter sequence initiates and mediates transcription of the DNA sequence corresponding to the second sequence. Generally, operably linked means that the nucleic acid sequences being linked are contiguous and, where necessary to join two protein coding regions, contiguous and in the same reading frame. The cassette may additionally contain at least one additional gene to be cotransformed into the organism.

[1314] Alternatively, the additional gene(s) can be provided on multiple expression cassettes.

[1315] Such an expression cassette is provided with a plurality of restriction sites for insertion of the mutated PPO nucleic acid sequence to be under the transcriptional regulation of the regulatory regions. The expression cassette may additionally contain selectable marker genes.

[1316] The expression cassette of the present invention will include in the 5′-3′ direction of transcription, a transcriptional and translational initiation region (i.e., a promoter), a mutated PPO encoding nucleic acid sequence of the invention, and a transcriptional and translational termination region (i.e., termination region) functional in plants. The promoter may be native or analogous, or foreign or heterologous, to the plant host and/or to the mutated PPO nucleic acid sequence of the invention. Additionally, the promoter may be the natural sequence or alternatively a synthetic sequence. Where the promoter is “foreign” or “heterologous” to the plant host, it is intended that the promoter is not found in the native plant into which the promoter is introduced. Where the promoter is “foreign” or “heterologous” to the mutated PPO nucleic acid sequence of the invention, it is intended that the promoter is not the native or naturally occurring promoter for the operably linked mutated PPO nucleic acid sequence of the invention. As used herein, a chimeric gene comprises a coding sequence operably linked to a transcription initiation region that is heterologous to the coding sequence.

[1317] While it may be preferable to express the mutated PPO nucleic acids of the invention using heterologous promoters, the native promoter sequences may be used. Such constructs would change expression levels of the mutated PPO protein in the plant or plant cell. Thus, the phenotype of the plant or plant cell is altered.

[1318] The termination region may be native with the transcriptional initiation region, may be native with the operably linked mutated PPO sequence of interest, may be native with the plant host, or may be derived from another source (i.e., foreign or heterologous to the promoter, the mutated PPO nucleic acid sequence of interest, the plant host, or any combination thereof). Convenient termination regions are available from the Ti-plasmid of A. tumefaciens, such as the octopine synthase and nopaline synthase termination regions. See also Guerineau et al. (1991) Mol. Gen. Genet. 262: 141-144; Proudfoot (1991) Cell 64:671-674; Sanfacon et al. (1991) Genes Dev. 5: 141-149; Mogen et al. (1990) Plant Cell 2: 1261-1272; Munroe et al. (1990) Gene 91: 151-158; Ballas t al. (1989) Nucleic Acids Res. 17:7891-7903; and Joshi et al. (1987) Nucleic Acid Res. 15:9627-9639. Where appropriate, the gene(s) may be optimized for increased expression in the transformed plant. That is, the genes can be synthesized using plant-preferred codons for improved expression. See, for example, Campbell and Gowri (1990) Plant Physiol. 92: 1-11 for a discussion of host-preferred codon usage. Methods are available in the art for synthesizing plant-preferred genes. See, for example, U.S. Pat. Nos. 5,380,831, and 5,436,391, and Murray et al. (1989) Nucleic Acids Res. 17:477-498, herein incorporated by reference.

[1319] Additional sequence modifications are known to enhance gene expression in a cellular host.

[1320] These include elimination of sequences encoding spurious polyadenylation signals, exon-intron splice site signals, transposon-like repeats, and other such well-characterized sequences that may be deleterious to gene expression. The G-C content of the sequence may be adjusted to levels average for a given cellular host, as calculated by reference to known genes expressed in the host cell. When possible, the sequence is modified to avoid predicted hairpin secondary mRNA structures. Nucleotide sequences for enhancing gene expression can also be used in the plant expression vectors. These include the introns of the maize AdhI, intronI gene (Callis et al. Genes and Development 1: 1183-1200, 1987), and leader sequences, (W-sequence) from the Tobacco Mosaic virus (TMV), Maize Chlorotic Mottle Virus and Alfalfa Mosaic Virus (Gallie et al. Nucleic Acid Res. 15:8693-8711, 1987 and Skuzeski et al. Plant Mol. Biol. 15:65-79, 1990). The first intron from the shrunken-1 locus of maize, has been shown to increase expression of genes in chimeric gene constructs. U.S. Pat. Nos. 5,424,412 and 5,593,874 disclose the use of specific introns in gene expression constructs, and Gallie et al. (Plant Physiol. 106:929-939, 1994) also have shown that introns are useful for regulating gene expression on a tissue specific basis. To further enhance or to optimize mutated PPO gene expression, the plant expression vectors of the invention may also contain DNA sequences containing matrix attachment regions (MARs). Plant cells transformed with such modified expression systems, then, may exhibit overexpression or constitutive expression of a nucleotide sequence of the invention.

[1321] The expression cassettes of the present invention may additionally contain 5′ leader sequences in the expression cassette construct. Such leader sequences can act to enhance translation. Translation leaders are known in the art and include: picornavirus leaders, for example, EMCV leader (Encephalomyocarditis 5′ noncoding region) (Elroy-Stein et al. (1989) Proc. Natl. Acad. ScL USA 86:6126-6130); potyvirus leaders, for example, TEV leader (Tobacco Etch Virus) (Gallie et al. (1995) Gene 165(2):233-238), MDMV leader (Maize Dwarf Mosaic Virus) (Virology 154:9-20), and human immunoglobulin heavy-chain binding protein (BiP) (Macejak et al. (1991) Nature 353:90-94); untranslated leader from the coat protein mRNA of alfalfa mosaic virus (AMV RNA 4) (Jobling et al. (1987) Nature 325:622-625); tobacco mosaic virus leader (TMV) (Gallie et al. (1989) in Molecular Biology of RNA, ed. Cech (Liss, N.Y.), pp. 237-256); and maize chlorotic mottle virus leader (MCMV) (Lommel et al. (1991) Virology 81:382-385). See also, Della-Cioppa et al. (1987) Plant Physiol. 84:965-968. Other methods known to enhance translation can also be utilized, for example, introns, and the like.

[1322] In preparing the expression cassette, the various DNA fragments may be manipulated, so as to provide for the DNA sequences in the proper orientation and, as appropriate, in the proper reading frame. Toward this end, adapters or linkers may be employed to join the DNA fragments or other manipulations may be involved to provide for convenient restriction sites, removal of superfluous DNA, removal of restriction sites, or the like. For this purpose, in vitro mutagenesis, primer repair, restriction, annealing, resubstitutions, e.g., transitions and trans versions, may be involved.

[1323] A number of promoters can be used in the practice of the invention. The promoters can be selected based on the desired outcome. The nucleic acids can be combined with constitutive, tissue-preferred, or other promoters for expression in plants. Such constitutive promoters include, for example, the core promoter of the Rsyn7 promoter and other constitutive promoters disclosed in WO 99/43838 and U.S. Pat. No. 6,072,050; the core CaMV 35S promoter (Odell et al. (1985) Nature 313:810-812); rice actin (McElroy et al. (1990) Plant Cell 2: 163-171); ubiquitin (Christensen et al. (1989) Plant Mol. Biol. 12:619-632 and Christensen et al. (1992) Plant Mol. Biol. 18:675-689); pEMU (Last et al. (1991) Theor. Appl. Genet. 81:581-588); MAS (Velten et al. (1984) EMBO J. 3:2723-2730); ALS promoter (U.S. Pat. No. 5,659,026), and the like. Other constitutive promoters include, for example, U.S. Pat. Nos. 5,608,149; 5,608,144; 5,604,121; 5,569,597; 5,466,785; 5,399,680; 5,268,463; 5,608,142; and 6,177,611.

[1324] Tissue-preferred promoters can be utilized to target enhanced mutated PPO expression within a particular plant tissue. Such tissue-preferred promoters include, but are not limited to, leaf-preferred promoters, root-preferred promoters, seed-preferred promoters, and stem-preferred promoters. Tissue-preferred promoters include Yamamoto et al. (1997) Plant J. 12(2):255-265; Kawamata et al. (1997) Plant Cell Physiol. 38(7):792-803; Hansen et al. (1997) Mol. Gen Genet. 254(3):337-343; Russell et al. (1997) Transgenic Res. 6(2): 157-168; Rinehart et al. (1996) Plant Physiol. 112(3): 1331-1341; Van Camp et al. (1996) Plant Physiol. 112(2):525-535; Canevascini et al. (1996) Plant Physiol. 112(2):513-524; Yamamoto et al. (1994) Plant Cell Physiol. 35(5):773-778; Lam (1994) Results Probl. Cell Differ. 20: 181-196; Orozco et al. (1993) Plant Mol Biol. 23(6): 1129-1138; Matsuoka e/[alpha]/. (1993) Proc Natl. Acad. Sci. USA 90(20):9586-9590; and Guevara-Garcia et al. (1993) Plant J. 4(3):495-505. Such promoters can be modified, if necessary, for weak expression. In one embodiment, the nucleic acids of interest are targeted to the chloroplast for expression. In this manner, where the nucleic acid of interest is not directly inserted into the chloroplast, the expression cassette will additionally contain a chloroplast-targeting sequence comprising a nucleotide sequence that encodes a chloroplast transit peptide to direct the gene product of interest to the chloroplasts. Such transit peptides are known in the art. With respect to chloroplast-targeting sequences, “operably linked” means that the nucleic acid sequence encoding a transit peptide (i.e., the chloroplast-targeting sequence) is linked to the mutated PPO nucleic acid of the invention such that the two sequences are contiguous and in the same reading frame. See, for example, Von Heijne et al. (1991) Plant Mol. Biol. Rep. 9: 104-126; Clark et al. (1989) J. Biol. Chem. 264:17544-17550; Della-Cioppa et al. (1987) Plant Physiol. 84:965-968; Romer et al. (1993) Biochem. Biophys. Res. Commun. 196:1414-1421; and Shah et al. (1986) Science 233:478-481. While the mutated PPO proteins of the invention include a native chloroplast transit peptide, any chloroplast transit peptide known in the art can be fused to the amino acid sequence of a mature mutated PPO protein of the invention by operably linking a choloroplast-targeting sequence to the 5′-end of a nucleotide sequence encoding a mature mutated PPO protein of the invention. Chloroplast targeting sequences are known in the art and include the chloroplast small subunit of ribulose-1,5-bisphosphate carboxylase (Rubisco) (de Castro Silva Filho et al. (1996) Plant Mol. Biol. 30:769-780; Schnell et al. (1991) J. Biol. Chem. 266(5):3335-3342); 5-(enolpyruvyl)shikimate-3-phosphate synthase (EPSPS) (Archer et al. (1990) J. Bioenerg. Biomemb. 22(6):789-810); tryptophan synthase (Zhao et al. (1995) J. Biol. Chem. 270(11):6081-6087); plastocyanin (Lawrence et al. (1997) J. Biol. Chem. 272(33):20357-20363); chorismate synthase (Schmidt et al. (1993) J. Biol. Chem. 268(36):27447-27457); and the light harvesting chlorophyll a/b binding protein (LHBP) (Lamppa et al. (1988) J. Biol. Chem. 263: 14996-14999). See also Von Heijne et al. (1991) Plant Mol. Biol. Rep. 9: 104-126; Clark et al. (1989) J. Biol. Chem. 264:17544-17550; Della-Cioppa et al. (1987) Plant Physiol. 84:965-968; Romer et al. (1993) Biochem. Biophys. Res. Commun. 196: 1414-1421; and Shah et al. (1986) Science 233:478-481.

[1325] Methods for transformation of chloroplasts are known in the art. See, for example, Svab et al. (1990) Proc. Natl. Acad. ScL USA 87:8526-8530; Svab and Maliga (1993) Proc. Natl. Acad. Sci. USA 90:913-917; Svab and Maliga (1993) EMBO J. 12:601-606. The method relies on particle gun delivery of DNA containing a selectable marker and targeting of the DNA to the plastid genome through homologous recombination. Additionally, plastid transformation can be accomplished by transactivation of a silent plastid-borne transgene by tissue-preferred expression of a nuclear-encoded and plastid-directed RNA polymerase. Such a system has been reported in McBride et al. (1994) Proc. Natl. Acad. Sci. USA 91:7301-7305. The nucleic acids of interest to be targeted to the chloroplast may be optimized for expression in the chloroplast to account for differences in codon usage between the plant nucleus and this organelle. In this manner, the nucleic acids of interest may be synthesized using chloroplast-preferred codons. See, for example, U.S. Pat. No. 5,380,831, herein incorporated by reference.

[1326] In a preferred embodiment, the mutated PPO nucleic acid comprises a polynucleotide sequence selected from the group consisting of: a) a polynucleotide encoding a polypeptide as shown in SEQ ID NO: 1, 2, 3, 4, 5, 6, 7, 8, 9, 10, 11, 12, 13, 14, 15, 16, 17, 18, 19, 20, 21, 22, 23, 24, 25, 26, 27, 28, 29, 30, 31, 32, 33, 34, 35, 36, 37, 38, 39, 40, 41, 42, 43, 44, 45, 46, 47, 48, 49, 50, 51, 52, 53, 54, 55, 56, 57, 58, 59, 60, 61, 62, 63, 64, 65, 66, 67, 68, 69, 70, 71, 72, 73, 74, 75, 76, 77, 78, 79, 80, 81, 82, 83, 84, 85, 86, 87, 88, 89, 90, 91, 92, 93, 94, 95, 96, 97, 98, 99, 100, 101, 102, 103, 104, 105, 106, 107, 108, 109, 110, 111, 112, 113, 114, 115, 116, 117, 118, 119, 120, 121, 122, 123, 124, 125, 126, 127, 128, 129, 130, 131, 132, 133, 134, 135, 136, 137, 138, 139, 140, 141, 142, 143, 144, 145, 146, 147, 148, 149, 150, 151, 152, 153, 154, 155, 156, 157, 158, 159, 160, 161, 162, 163, 164, 165, 166, 167, 168, 169, 170, 171, 172, 173, 174, 175, 176, 177, 178, 179, 180, 181, 182, 183, 184, 185, 186, 187, 188, 189, 190, 191, 192, 193, 194, 195, 196, 197, 198, 199, 200, 201, 202, 203, 204, 205, 206, 207, 208, 209, 210, 211, 212, 213, 214, 215, 216, 217, 218, 219, 220, 221, 222, 223, 224, 225, 226, 227, 228, 229, 230, 231, 232, 233, 234, 235, 236, 237, 238, 239, 240, 241, 242, 243, 244, 245, 246, 247, 248, 249, 250, 251, 252, 253, 254, 255, 256, 257, 258, 259, 260, 261, 262, 263, 264, 265, 266, 267, 268, 269, 270, 271, 272, 273, 274, 275, 276, 277, 278, 279, 280, 281, 282, 283, 284, 285, 286, 287, 288, 289, 290, 291, 292, 293, 294, 295, 296, 297, 298, 299, 300, 301, 312, or 313, or a variant or derivative thereof; b) a polynucleotide comprising at least 60 consecutive nucleotides of any of a); and c) a polynucleotide complementary to the polynucleotide of any of a) through b)

[1327] Preferably, the expression cassette of the present invention further comprises a transcription initiation regulatory region and a translation initiation regulatory region that are functional in the plant.

[1328] While the polynucleotides of the invention find use as selectable marker genes for plant transformation, the expression cassettes of the invention can include another selectable marker gene for the selection of transformed cells. Selectable marker genes, including those of the present invention, are utilized for the selection of transformed cells or tissues. Marker genes include, but are not limited to, genes encoding antibiotic resistance, such as those encoding neomycin phosphotransferase II (NEO) and hygromycin phosphotransferase (HPT), as well as genes conferring resistance to herbicidal compounds, such as glufosinate ammonium, bromoxynil, imidazolinones, and 2,4-dichlorophenoxyacetate (2,4-D). See generally, Yarranton (1992) Curr. Opin. Biotech. 3:506-511; Christophers on et al (1992) Proc. Natl. Acad. ScL USA 89:6314-6318; Yao et al. (1992) Cell 71:63-72; Reznikoff (1992) Mol Microbiol 6:2419-2422; Barkley et al (1980) in The Operon, pp. 177-220; Hu et al (1987) Cell 48:555-566; Brown et al (1987) Cell 49:603-612; Figge et al (1988) Cell 52:713-722; Deuschle et al (1989) Proc. Natl Acad. AcL USA 86:5400-5404; Fuerst et al (1989) Proc. Natl Acad. ScL USA 86:2549-2553; Deuschle et al (1990) Science 248:480-483; Gossen (1993) Ph.D. Thesis, University of Heidelberg; Reines et al (1993) Proc. Natl Acad. ScL USA 90: 1917-1921; Labow et al (1990) Mol Cell Biol 10:3343-3356; Zambretti et al (1992) Proc. Natl Acad. ScL USA 89:3952-3956; Bairn et al (1991) Proc. Natl Acad. ScL USA 88:5072-5076; Wyborski et al (1991) Nucleic Acids Res. 19:4647-4653; Hillenand-Wissman (1989) Topics Mol Struc. Biol 10: 143-162; Degenkolb et al (1991) Antimicrob. Agents Chemother. 35: 1591-1595; Kleinschnidt et al (1988) Biochemistry 27: 1094-1104; Bonin (1993) Ph.D. Thesis, University of Heidelberg; Gossen et al (1992) Proc. Natl Acad. ScL USA 89:5547-5551; Oliva et al (1992) Antimicrob. Agents Chemother. 36:913-919; Hlavka et al (1985) Handbook of Experimental Pharmacology, Vol. 78 (Springer-Verlag, Berlin); Gill et al (1988) Nature 334:721-724. Such disclosures are herein incorporated by reference. The above list of selectable marker genes is not meant to be limiting. Any selectable marker gene can be used in the present invention.

[1329] The invention further provides an isolated recombinant expression vector comprising the expression cassette containing a mutated PPO nucleic acid as described above, wherein expression of the vector in a host cell results in increased tolerance to a PPO-inhibiting herbicide as compared to a wild type variety of the host cell. As used herein, the term “vector” refers to a nucleic acid molecule capable of transporting another nucleic acid to which it has been linked. One type of vector is a “plasmid,” which refers to a circular double stranded DNA loop into which additional DNA segments can be ligated. Another type of vector is a viral vector, wherein additional DNA segments can be ligated into the viral genome. Certain vectors are capable of autonomous replication in a host cell into which they are introduced (e.g., bacterial vectors having a bacterial origin of replication and episomal mammalian vectors). Other vectors (e.g., non-episomal mammalian vectors) are integrated into the genome of a host cell upon introduction into the host cell, and thereby are replicated along with the host genome. Moreover, certain vectors are capable of directing the expression of genes to which they are operatively linked. Such vectors are referred to herein as “expression vectors.” In general, expression vectors of utility in recombinant DNA techniques are often in the form of plasmids. In the present specification, “plasmid” and “vector” can be used interchangeably as the plasmid is the most commonly used form of vector. However, the invention is intended to include such other forms of expression vectors, such as viral vectors (e.g., replication defective retroviruses, adenoviruses, and adeno-associated viruses), which serve equivalent functions.

[1330] The recombinant expression vectors of the invention comprise a nucleic acid of the invention in a form suitable for expression of the nucleic acid in a host cell, which means that the recombinant expression vectors include one or more regulatory sequences, selected on the basis of the host cells to be used for expression, which is operably linked to the nucleic acid sequence to be expressed. Regulatory sequences include those that direct constitutive expression of a nucleotide sequence in many types of host cells and those that direct expression of the nucleotide sequence only in certain host cells or under certain conditions. It will be appreciated by those skilled in the art that the design of the expression vector can depend on such factors as the choice of the host cell to be transformed, the level of expression of polypeptide desired, etc. The expression vectors of the invention can be introduced into host cells to thereby produce polypeptides or peptides, including fusion polypeptides or peptides, encoded by nucleic acids as described herein (e.g., mutated PPO polypeptides, fusion polypeptides, etc.).

[1331] In a preferred embodiment of the present invention, the mutated PPO polypeptides are expressed in plants and plants cells such as unicellular plant cells (such as algae) (See Falciatore et al., 1999, Marine Biotechnology 1(3):239-251 and references therein) and plant cells from higher plants (e.g., the spermatophytes, such as crop plants). A mutated PPO polynucleotide may be “introduced” into a plant cell by any means, including transfection, transformation or transduction, electroporation, particle bombardment, agroinfection, biolistics, and the like.

[1332] Suitable methods for transforming or transfecting host cells including plant cells can be found in Sambrook et al. (Molecular Cloning: A Laboratory Manual. 2nd, ed., Cold Spring Harbor Laboratory, Cold Spring Harbor Laboratory Press, Cold Spring Harbor, N.Y., 1989) and other laboratory manuals such as Methods in Molecular Biology, 1995, Vol. 44, Agrobacterium protocols, ed: Gartland and Davey, Humana Press, Totowa, N.J. As increased tolerance to PPO-inhibiting herbicides is a general trait wished to be inherited into a wide variety of plants like maize, wheat, rye, oat, triticale, rice, barley, soybean, peanut, cotton, rapeseed and canola, manihot, pepper, sunflower and tagetes, solanaceous plants like potato, tobacco, eggplant, and tomato, Vicia species, pea, alfalfa, bushy plants (coffee, cacao, tea), Salix species, trees (oil palm, coconut), perennial grasses, and forage crops, these crop plants are also preferred target plants for a genetic engineering as one further embodiment of the present invention. In a preferred embodiment, the plant is a crop plant. Forage crops include, but are not limited to, Wheatgrass, Canarygrass, Bromegrass, Wildrye Grass, Bluegrass, Orchardgrass, Alfalfa, Salfoin, Birdsfoot Trefoil, Alsike Clover, Red Clover, and Sweet Clover.

[1333] In one embodiment of the present invention, transfection of a mutated PPO polynucleotide into a plant is achieved by Agrobacterium mediated gene transfer. One transformation method known to those of skill in the art is the dipping of a flowering plant into an Agrobacteria solution, wherein the Agrobacteria contains the mutated PPO nucleic acid, followed by breeding of the transformed gametes. Agrobacterium mediated plant transformation can be performed using for example the GV3101(pM P90) (Koncz and Schell, 1986, Mol. Gen. Genet. 204:383-396) or LBA4404 (Clontech) Agrobacterium tumefaciens strain. Transformation can be performed by standard transformation and regeneration techniques (Deblaere et al., 1994, Nucl. Acids. Res. 13:4777-4788; Gelvin, Stanton B. and Schilperoort, Robert A, Plant Molecular Biology Manual, 2nd Ed.—Dordrecht: Kluwer Academic Publ., 1995.—in Sect., Ringbuc Zentrale Signatur: BT11-P ISBN 0-7923-2731-4; Glick, Bernard R. and Thompson, John E., Methods in Plant Molecular Biology and Biotechnology, Boca Raton: CRC Press, 1993 360 S., ISBN 0-8493-5164-2). For example, rapeseed can be transformed via cotyledon or hypocotyl transformation (Moloney et al., 1989, Plant Cell Report 8:238-242; De Block et al., 1989, Plant Physiol. 91:694-701). Use of antibiotics for Agrobacterium and plant selection depends on the binary vector and the Agrobacterium strain used for transformation. Rapeseed selection is normally performed using kanamycin as selectable plant marker. Agrobacterium mediated gene transfer to flax can be performed using, for example, a technique described by Mlynarova et al., 1994, Plant Cell Report 13:282-285. Additionally, transformation of soybean can be performed using for example a technique described in European Patent No. 0424 047, U.S. Pat. No. 5,322,783, European Patent No. 0397 687, U.S. Pat. No. 5,376,543, or U.S. Pat. No. 5,169,770. Transformation of maize can be achieved by particle bombardment, polyethylene glycol mediated DNA uptake, or via the silicon carbide fiber technique. (See, for example, Freeling and Walbot “The maize handbook” Springer Verlag: New York (1993) ISBN 3-540-97826-7). A specific example of maize transformation is found in U.S. Pat. No. 5,990,387, and a specific example of wheat transformation can be found in PCT Application No. WO 93/07256.

[1334] According to the present invention, the introduced mutated PPO polynucleotide may be maintained in the plant cell stably if it is incorporated into a non-chromosomal autonomous replicon or integrated into the plant chromosomes. Alternatively, the introduced mutated PPO polynucleotide may be present on an extra-chromosomal non-replicating vector and be transiently expressed or transiently active. In one embodiment, a homologous recombinant microorganism can be created wherein the mutated PPO polynucleotide is integrated into a chromosome, a vector is prepared which contains at least a portion of an PPO gene into which a deletion, addition, or substitution has been introduced to thereby alter, e.g., functionally disrupt, the endogenous PPO gene and to create a mutated PPO gene. To create a point mutation via homologous recombination, DNA-RNA hybrids can be used in a technique known as chimeraplasty (Cole-Strauss et al., 1999, Nucleic Acids Research 27(5):1323-1330 and Kmiec, 1999, Gene therapy American Scientist 87(3):240-247). Other homologous recombination procedures in Triticum species are also well known in the art and are contemplated for use herein.

[1335] In the homologous recombination vector, the mutated PPO gene can be flanked at its 5′ and 3′ ends by an additional nucleic acid molecule of the PPO gene to allow for homologous recombination to occur between the exogenous mutated PPO gene carried by the vector and an endogenous PPO gene, in a microorganism or plant. The additional flanking PPO nucleic acid molecule is of sufficient length for successful homologous recombination with the endogenous gene. Typically, several hundreds of base pairs up to kilobases of flanking DNA (both at the 5′ and 3′ ends) are included in the vector (see e.g., Thomas, K. R., and Capecchi, M. R., 1987, Cell 51:503 for a description of homologous recombination vectors or Strepp et al., 1998, PNAS, 95(8):4368-4373 for cDNA based recombination in Physcomitrella patens). However, since the mutated PPO gene normally differs from the PPO gene at very few amino acids, a flanking sequence is not always necessary. The homologous recombination vector is introduced into a microorganism or plant cell (e.g., via polyethylene glycol mediated DNA), and cells in which the introduced mutated PPO gene has homologously recombined with the endogenous PPO gene are selected using art-known techniques.

[1336] In another embodiment, recombinant microorganisms can be produced that contain selected systems that allow for regulated expression of the introduced gene. For example, inclusion of a mutated PPO gene on a vector placing it under control of the lac operon permits expression of the mutated PPO gene only in the presence of IPTG. Such regulatory systems are well known in the art.

[1337] Another aspect of the invention pertains to host cells into which a recombinant expression vector of the invention has been introduced. The terms “host cell” and “recombinant host cell” are used interchangeably herein. It is understood that such terms refer not only to the particular subject cell but they also apply to the progeny or potential progeny of such a cell. Because certain modifications may occur in succeeding generations due to either mutation or environmental influences, such progeny may not, in fact, be identical to the parent cell, but are still included within the scope of the term as used herein. A host cell can be any prokaryotic or eukaryotic cell. For example, a mutated PPO polynucleotide can be expressed in bacterial cells such as C. glutamicum, insect cells, fungal cells, or mammalian cells (such as Chinese hamster ovary cells (CHO) or COS cells), algae, ciliates, plant cells, fungi or other microorganisms like C. glutamicum. Other suitable host cells are known to those skilled in the art.

[1338] A host cell of the invention, such as a prokaryotic or eukaryotic host cell in culture, can be used to produce (i.e., express) a mutated PPO polynucleotide. Accordingly, the invention further provides methods for producing mutated PPO polypeptides using the host cells of the invention. In one embodiment, the method comprises culturing the host cell of invention (into which a recombinant expression vector encoding a mutated PPO polypeptide has been introduced, or into which genome has been introduced a gene encoding a wild-type or mutated PPO polypeptide) in a suitable medium until mutated PPO polypeptide is produced. In another embodiment, the method further comprises isolating mutated PPO polypeptides from the medium or the host cell. Another aspect of the invention pertains to isolated mutated PPO polypeptides, and biologically active portions thereof. An “isolated” or “purified” polypeptide or biologically active portion thereof is free of some of the cellular material when produced by recombinant DNA techniques, or chemical precursors or other chemicals when chemically synthesized. The language “substantially free of cellular material” includes preparations of mutated PPO polypeptide in which the polypeptide is separated from some of the cellular components of the cells in which it is naturally or recombinantly produced. In one embodiment, the language “substantially free of cellular material” includes preparations of a mutated PPO polypeptide having less than about 30% (by dry weight) of non-mutated PPO material (also referred to herein as a “contaminating polypeptide”), more preferably less than about 20% of non-mutated PPO material, still more preferably less than about 10% of non-mutated PPO material, and most preferably less than about 5% non-mutated PPO material.

[1339] When the mutated PPO polypeptide, or biologically active portion thereof, is recombinantly produced, it is also preferably substantially free of culture medium, i.e., culture medium represents less than about 20%, more preferably less than about 10%, and most preferably less than about 5% of the volume of the polypeptide preparation. The language “substantially free of chemical precursors or other chemicals” includes preparations of mutated PPO polypeptide in which the polypeptide is separated from chemical precursors or other chemicals that are involved in the synthesis of the polypeptide. In one embodiment, the language “substantially free of chemical precursors or other chemicals” includes preparations of a mutated PPO polypeptide having less than about 30% (by dry weight) of chemical precursors or non-mutated PPO chemicals, more preferably less than about 20% chemical precursors or non-mutated PPO chemicals, still more preferably less than about 10% chemical precursors or non-mutated PPO chemicals, and most preferably less than about 5% chemical precursors or non-mutated PPO chemicals. In preferred embodiments, isolated polypeptides, or biologically active portions thereof, lack contaminating polypeptides from the same organism from which the mutated PPO polypeptide is derived. Typically, such polypeptides are produced by recombinant expression of, for example, a mutated PPO polypeptide in plants other than, or in microorganisms such as C. glutamicum, ciliates, algae, or fungi.

[1340] In other aspects, a method for treating a plant of the present invention is provided.

[1341] In some embodiments, the method comprises contacting the plant with an agronomically acceptable composition.

[1342] In another aspect, the present invention provides a method for preparing a descendent seed. The method comprises planting a seed of or capable of producing a plant of the present invention. In one embodiment, the method further comprises growing a descendent plant from the seed; and harvesting a descendant seed from the descendent plant. In other embodiments, the method further comprises applying a PPO-inhibiting herbicides herbicidal composition to the descendent plant.

[1343] In another embodiment, the invention refers to harvestable parts of the transgenic plant according to the present invention. Preferably, the harvestable parts comprise the PPO nucleic acid or PPO protein of the present invention. The harvestable parts may be seeds, roots, leaves and/or flowers comprising the PPO nucleic acid or PPO protein or parts thereof. Preferred parts of soy plants are soy beans comprising the PPO nucleic acid or PPO protein.

[1344] In another embodiment, the invention refers to products derived from a plant according to the present invention, parts thereof or harvestable parts thereof. A preferred plant product is fodder, seed meal, oil, or seed-treatment-coated seeds. Preferably, the meal and/or oil comprises the mutated PPO nucleic acids or PPO proteins of the present invention.

[1345] In another embodiment, the invention refers to a method for the production of a product, which method comprises
[1346] a) growing the plants of the invention or obtainable by the methods of invention and
[1347] b) producing said product from or by the plants of the invention and/or parts, e.g. seeds, of these plants.

[1348] In a further embodiment the method comprises the steps
[1349] a) growing the plants of the invention,
[1350] b) removing the harvestable parts as defined above from the plants and
[1351] c) producing said product from or by the harvestable parts of the invention.

[1352] The product may be produced at the site where the plant has been grown, the plants and/or parts thereof may be removed from the site where the plants have been grown to produce the product. Typically, the plant is grown, the desired harvestable parts are removed from the plant, if feasible in repeated cycles, and the product made from the harvestable parts of the plant. The step of growing the plant may be performed only once each time the methods of the invention is performed, while allowing repeated times the steps of product production e.g. by repeated removal of harvestable parts of the plants of the invention and if necessary further processing of these parts to arrive at the product. It is also possible that the step of growing the plants of the invention is repeated and plants or harvestable parts are stored until the production of the product is then performed once for the accumulated plants or plant parts. Also, the steps of growing the plants and producing the product may be performed with an overlap in time, even simultaneously to a large extend or sequentially. Generally the plants are grown for some time before the product is produced.

[1353] In one embodiment the products produced by said methods of the invention are plant products such as, but not limited to, a foodstuff, feedstuff, a food supplement, feed supplement, fiber, cosmetic and/or pharmaceutical. Foodstuffs are regarded as compositions used for nutrition and/or for supplementing nutrition. Animal feedstuffs and animal feed supplements, in particular, are regarded as foodstuffs.

[1354] In another embodiment the inventive methods for the production are used to make agricultural products such as, but not limited to, plant extracts, proteins, amino acids, carbohydrates, fats, oils, polymers, vitamins, and the like.

[1355] It is possible that a plant product consists of one or more agricultural products to a large extent.

[1356] As described above, the present invention teaches compositions and methods for increasing the PPO-inhibiting tolerance of a crop plant or seed as compared to a wild-type variety of the plant or seed. In a preferred embodiment, the PPO-inhibiting tolerance of a crop plant or seed is increased such that the plant or seed can withstand a PPO-inhibiting herbicide application of preferably approximately 1-1000 g ai ha⁻¹, more preferably 1-200 g ai ha⁻¹, even more preferably 5-150 g ai ha⁻¹, and most preferably 10-100 g ai ha⁻¹. As used herein, to “withstand” a PPO-inhibiting herbicide application means that the plant is either not killed or only moderately injured by such application. It will be understood by the person skilled in the art that the application rates may vary, depending on the environmental conditions such as temperature or humidity, and depending on the chosen kind of herbicide (active ingredient ai).

[1357] Furthermore, the present invention provides methods that involve the use of at least one PPO-inhibiting herbicide, optionally in combination with one or more herbicidal compounds B, and, optionally, a safener C, as described in detail supra.

[1358] In these methods, the PPO-inhibiting herbicide can be applied by any method known in the art including, but not limited to, seed treatment, soil treatment, and foliar treatment. Prior to application, the PPO-inhibiting herbicide can be converted into the customary formulations, for example solutions, emulsions, suspensions, dusts, powders, pastes and granules. The use form depends on the particular intended purpose; in each case, it should ensure a fine and even distribution of the compound according to the invention.

[1359] By providing plants having increased tolerance to PPO-inhibiting herbicide, a wide variety of formulations can be employed for protecting plants from weeds, so as to enhance plant growth and reduce competition for nutrients. A PPO-inhibiting herbicide can be used by itself for pre-emergence, post-emergence, pre-planting, and at-planting control of weeds in areas surrounding the crop plants described herein, or a PPO-inhibiting herbicide formulation can be used that contains other additives. The PPO-inhibiting herbicide can also be used as a seed treatment. Additives found in a PPO-inhibiting herbicide formulation include other herbicides, detergents, adjuvants, spreading agents, sticking agents, stabilizing agents, or the like. The PPO-inhibiting herbicide formulation can be a wet or dry preparation and can include, but is not limited to, flowable powders, emulsifiable concentrates, and liquid concentrates. The PPO-inhibiting herbicide and herbicide formulations can be applied in accordance with conventional methods, for example, by spraying, irrigation, dusting, or the like.

[1360] Suitable formulations are described in detail in PCT/EP2009/063387 and PCT/EP2009/063386, which are incorporated herein by reference.

[1361] It should also be understood that the foregoing relates to preferred embodiments of the present invention and that numerous changes may be made therein without departing from the scope of the invention. The invention is further illustrated by the following examples, which are not to be construed in any way as imposing limitations upon the scope thereof. On the contrary, it is to be clearly understood that resort may be had to various other embodiments, modifications, and equivalents thereof, which, after reading the description herein, may suggest themselves to those skilled in the art without departing from the spirit of the present invention and/or the scope of the appended claims.

### EXAMPLES

### Example 1

### Site-Directed Mutagenesis PPO

[1362] All nucleic acid coding sequence and all single and double mutants encoding a polypeptide comprising SEQ ID NO: 1, 2, 3, 4, 5, 6, 7, 8, 9, 10, 11, 12, 13, 14, 15, 16, 17, 18, 19, 20, 21, 22, 23, 24, 25, 26, 27, 28, 29, 30, 31, 32, 33, 34, 35, 36, 37, 38, 39, 40, 41, 42, 43, 44, 45, 46, 47, 48, 49, 50, 51, 52, 53, 54, 55, 56, 57, 58, 59, 60, 61, 62, 63, 64, 65, 66, 67, 68, 69, 70, 71, 72, 73, 74, 75, 76, 77, 78, 79, 80, 81, 82, 83, 84, 85, 86, 87, 88, 89, 90, 91, 92, 93, 94, 95, 96, 97, 98, 99, 100, 101, 102, 103, 104, 105, 106, 107, 108, 109, 110, 111, 112, 113, 114, 115, 116, 117, 118, 119, 120, 121, 122, 123, 124, 125, 126, 127, 128, 129, 130, 131, 132, 133, 134, 135, 136, 137, 138, 139, 140, 141, 142, 143, 144, 145, 146, 147, 148, 149, 150, 151, 152, 153, 154, 155, 156, 157, 158, 159, 160, 161, 162, 163, 164, 165, 166, 167, 168, 169, 170, 171, 172, 173, 174, 175, 176, 177, 178, 179, 180, 181, 182, 183, 184, 185, 186, 187, 188, 189, 190, 191, 192, 193, 194, 195, 196, 197, 198, 199, 200, 201, 202, 203, 204, 205, 206, 207, 208, 209, 210, 211, 212, 213, 214, 215, 216, 217, 218, 219, 220, 221, 222, 223, 224, 225, 226, 227, 228, 229, 230, 231, 232, 233, 234, 235, 236, 237, 238, 239, 240, 241, 242, 243, 244, 245, 246, 247, 248, 249, 250, 251, 252, 253, 254, 255, 256, 257, 258, 259, 260, 261, 262, 263, 264, 265, 266, 267, 268, 269, 270, 271, 272, 273, 274, 275, 276, 277, 278, 279, 280, 281, 282, 283, 284, 285, 286, 287, 288, 289, 290, 291, 292, 293, 294, 295, 296, 297, 298, 299, 300, 301, 312, or 313, are synthesized and cloned by Geneart (Geneart AG, Regensburg, Germany). Rational design mutants are synthesized by Geneart. Random PPO gene libraries are synthesized by Geneart. Plasmids are isolated from E. coli TOP10 by performing a plasmid minpreparation and confirmed by DNA sequencing.

### Example 2

### Expression and Purification of Recombinant Wildtype and Mutant PPO

[1363] (Taken from: Franck E. Dayan, Pankaj R. Daga, Stephen O. Duke, Ryan M. Lee, Patrick J. Tranel, Robert J. Doerksen. Biochemical and structural consequences of a glycine deletion in the α-8 helix of protoporphyrinogen oxidase. Biochimica et Biophysica Acta 1804 (2010), 1548-56) Clones in pRSET vector are transformed into BL21(DE3)-pLysS strain of E. coli. Cells are grown in 250 mL of LB with 100 μgmL-1 of carbenicillin, shaking overnight at 37° C. Cultures are diluted in 1 L of LB with antibiotic and grown at 37° C. shaking for 2 h, induced with 1 mM IPTG and grown at 25° C. shaking for 5 more hours. The cells are harvested by centrifugation at 1600×g, washed with 0.09% NaCl, and stored at −80° C. Cells are lysed using a French press at 140 M Pa in 50 mM sodium phosphate pH 7.5, 1 M NaCl, 5 mM imidazole, 5% glycerol, and 1 pg mL-1 leupeptin. Following lysis, 0.5 U of benzonase (Novagen, EMD Chemicals, Inc., Gibbstown, N.J.) and PMSF (final concentration of 1 mM) are added. Cell debris is removed by centrifugation at 3000×g. His-tagged PPO proteins are purified on a nickel activated Hitrap Chelating HP column (GE Healthcare Bio-Sciences Corp., Piscataway, N.J.) equilibrated with 20 mM sodium phosphate pH 8.0, 50 mM NaCl, 5 mM imidazole, 5 mM MgCl2, 0.1 mM EDTA, and 17% glycerol. PPO is eluted with 250 mMimidazole. The active protein is desalted on a PD-10 column (GE Healthcare Bio-Sciences Corp., Piscataway, N.J.) equilibrated with a 20 mM sodium phosphate buffer, pH 7.5, 5 mM MgCl2, 1 mM EDTA and 17% glycerol. Each litre of culture provided approximately 10 mg of pure PPO, which is stored at −20° C. until being used in assays.

### Example 3

### PPO Enzyme Assay (Non-Recombinant)

[1364] PPO protein (EC 1.3.3.4) is extracted from coleoptiles or shoots (150 g fresh weight) of dark-grown corn, black nightshade, morning glory, and velvetleaf seedlings as described previously (Grossmann et al. 2010). Before harvesting, the seedlings are allowed to green for 2 hours in the light in order to achieve the highest specific enzyme activities in the thylakoid fractions at low chlorophyll concentrations. At high chlorophyll concentrations significant quenching of fluorescence occurs, which limits the amount of green thylakoids that can be used in the test. Plant materials are homogenized in the cold with a Braun blender using a fresh-weight-to-volume ratio of 1:4. Homogenization buffer consisted of tris(hydroxymethyl)aminomethane (Tris)-HCl (50 mM; pH 7.3), sucrose (0.5 M), magnesium chloride (1 mM), ethylenediaminetetraacetic acid (EDTA) (1 mM) and bovine serum albumin (2 g L⁻¹). After filtration through four layers of Miracloth, crude plastid preparations are obtained after centrifugation at 10 000×g for 5 min and resuspension in homogenization buffer before centrifugation at 150×g for 2 min to remove crude cell debris. The supernatant is centrifuged at 4000×g for 15 min and the pellet fraction is resuspended in 1 ml of a buffer containing Tris-HCl (50 mM; pH 7.3), EDTA (2 mM), leupeptin (2 μM), pepstatin (2 μM) and glycerol (200 ml L⁻¹) and stored at −80° C. until use. Protein is determined in the enzyme extract with bovine serum albumin as a standard. PPO activity is assayed fluorometrically by monitoring the rate of Proto formation from chemically reduced protoporphyrinogen IX under initial velocity conditions. The assay mixture consisted of Tris-HCl (100 mM; pH 7.3), EDTA (1 mM), dithiothreitol (5 mM), Tween 80 (0.085%), protoporphyrinogen IX (2 μM), and 40 pg extracted protein in a total volume of 200 pl. The reaction is initiated by addition of substrate protoporphyrinogen IX at 22° C. saflufenacil, 1,5-dimethyl-6-thioxo-3-(2,2,7-trifluoro-3-oxo-4-(prop-2-ynyl)-3,4-dihydro-2H-benzo[b][1,4]oxazin-6-yl)-1,3,5-triazinane-2,4-dione (CAS 1258836-72-4), flumioxazin, butafenacil, acifluorfen, lactofen, bifenox, sulfentrazone, and photosynthesis inhibitor diuron as negative control are prepared in dimethyl sulfoxide (DMSO) solution (0.1 mMconcentration of DMSO in the assay) and added to the assay mixture in concentrations of 0.005 μM to 5 μM before incubation. Fluorescence is monitored directly from the assay mixture using a POLARstar Optima/Galaxy (BMG) with excitation at 405 nm and emission monitored at 630 nm. Non-enzymatic activity in the presence of heat-inactivated extract is negligible. Inhibition of enzyme activity induced by the herbicide is expressed as percentage inhibition relative to untreated controls. Molar concentrations of compound required for 50% enzyme inhibition (IC₅₀ values) are calculated by fitting the values to the dose-response equation using non-linear regression analysis.

### Example 4

### PPO Enzyme Assay (Recombinant)

[1365] Proto is purchased from Sigma-Aldrich (Milwaukee, Wis.). Protogen is prepared according to Jacobs and Jacobs (N. J. Jacobs, J. M. Jacobs, Assay for enzymatic protoporphyrinogen oxidation, a late step in heme synthesis, Enzyme 28 (1982) 206-219). Assays are conducted in 100 mM sodium phosphate pH 7.4 with 0.1 mM EDTA, 0.1% Tween 20, 5 μM FAD, and 500 mM imidazole. Dose-response curves with the PPO inhibitors saflufenacil, 1,5-dimethyl-6-thioxo-3-(2,2,7-trifluoro-3-oxo-4-(prop-2-ynyl)-3,4-dihydro-2H-benzo[b][1,4]oxazin-6-yl)-1,3,5-triazinane- 2,4-dione (CAS 1258836-72-4), flumioxazin, butafenacil, acifluorfen, lactofen, bifenox, sulfentrazone, and photosynthesis inhibitor diuron as negative control, and MC-15608 are obtained in the presence of 150 μM Protogen. The excitation and emission bandwidths are set at 1.5 and 30 nm, respectively. All assays are made in duplicates or triplicates and measured using a POLARstar Optima/Galaxy (BMG) with excitation at 405 nm and emission monitored at 630 nm. Molar concentrations of compound required for 50% enzyme inhibition (IC₅₀ values) are calculated by fitting the values to the dose-response equation using non-linear regression analysis. The results are shown in Table x.

### Example 5

### Engineering PPO-Derivative Herbicide Tolerant Plants Having Wildtype or Mutated PPO Sequences

[1366] PPO-derivative herbicide tolerant soybean (Glyceine max), corn (Zea mays), and Canola (Brassica napus or Brassica Rapa var. or Brassica campestris L.) plants are produced by a method as described by Olhoft et al. (US patent 2009/0049567). For transformation of soybean or Arabidopsis thaliana, Wildtype or Mutated PPO sequences encoding mutated PPO polypeptides comprising SEQ ID NO: 1, 2, 3, 4, 5, 6, 7, 8, 9, 10, 11, 12, 13, 14, 15, 16, 17, 18, 19, 20, 21, 22, 23, 24, 25, 26, 27, 28, 29, 30, 31, 32, 33, 34, 35, 36, 37, 38, 39, 40, 41, 42, 43, 44, 45, 46, 47, 48, 49, 50, 51, 52, 53, 54, 55, 56, 57, 58, 59, 60, 61, 62, 63, 64, 65, 66, 67, 68, 69, 70, 71, 72, 73, 74, 75, 76, 77, 78, 79, 80, 81, 82, 83, 84, 85, 86, 87, 88, 89, 90, 91, 92, 93, 94, 95, 96, 97, 98, 99, 100, 101, 102, 103, 104, 105, 106, 107, 108, 109, 110, 111, 112, 113, 114, 115, 116, 117, 118, 119, 120, 121, 122, 123, 124, 125, 126, 127, 128, 129, 130, 131, 132, 133, 134, 135, 136, 137, 138, 139, 140, 141, 142, 143, 144, 145, 146, 147, 148, 149, 150, 151, 152, 153, 154, 155, 156, 157, 158, 159, 160, 161, 162, 163, 164, 165, 166, 167, 168, 169, 170, 171, 172, 173, 174, 175, 176, 177, 178, 179, 180, 181, 182, 183, 184, 185, 186, 187, 188, 189, 190, 191, 192, 193, 194, 195, 196, 197, 198, 199, 200, 201, 202, 203, 204, 205, 206, 207, 208, 209, 210, 211, 212, 213, 214, 215, 216, 217, 218, 219, 220, 221, 222, 223, 224, 225, 226, 227, 228, 229, 230, 231, 232, 233, 234, 235, 236, 237, 238, 239, 240, 241, 242, 243, 244, 245, 246, 247, 248, 249, 250, 251, 252, 253, 254, 255, 256, 257, 258, 259, 260, 261, 262, 263, 264, 265, 266, 267, 268, 269, 270, 271, 272, 273, 274, 275, 276, 277, 278, 279, 280, 281, 282, 283, 284, 285, 286, 287, 288, 289, 290, 291, 292, 293, 294, 295, 296, 297, 298, 299, 300, 301, 312, or 313, are cloned with standard cloning techniques as described in Sambrook et al. (Molecular cloning (2001) Cold Spring Harbor Laboratory Press) in a binary vector containing resistance marker gene cassette (AHAS) and mutated PPO sequence (marked as GOD in between ubiquitin promoter (PcUbi) and nopaline synthase terminator (NOS) sequence. To facilitate plastid expression, selected constructs as listed in Table 3 below, where operably linked to the Silene pratensis ferredoxin transit peptide (tpFNR) as generally described in the description SUPRA. For corn transformation, Wildtype or Mutated PPO sequences are cloned with standard cloning techniques as described in Sambrook et al. (Molecular cloning (2001) Cold Spring Harbor Laboratory Press) in a binary vector containing resistance marker gene cassette (AHAS) and mutated PPO sequence (marked as GOD in between corn ubiquitin promoter (ZmUbi) and nopaline synthase terminator (NOS) sequence. Binary plasmids are introduced to Agrobacterium tumefaciens for plant transformation. Plasmid constructs are introduced into soybean's axillary meristem cells at the primary node of seedling explants via Agrobacterium-mediated transformation. After inoculation and co-cultivation with Agrobacteria, the explants are transferred to shoot introduction media without selection for one week. The explants are subsequently transferred to a shoot induction medium with 1-3 μM imazapyr (Arsenal) for 3 weeks to select for transformed cells. Explants with healthy callus/shoot pads at the primary node are then transferred to shoot elongation medium containing 1-3 μM imazapyr until a shoot elongated or the explant died. Transgenic plantlets are rooted, subjected to TaqMan analysis for the presence of the transgene, transferred to soil and grown to maturity in greenhouse. Transformation of corn plants are done by a method described by McElver and Singh (WO 2008/124495). Plant transformation vector constructs containing mutated PPO sequences are introduced into maize immature embryos via Agrobacterium-mediated transformation.

[1367] Transformed cells are selected in selection media supplemented with 0.5-1.5 μM imazethapyr for 3-4 weeks. Transgenic plantlets are regenerated on plant regeneration media and rooted afterwards. Transgenic plantlets are subjected to TaqMan analysis for the presence of the transgene before being transplanted to potting mixture and grown to maturity in greenhouse. Arabidopsis thaliana are transformed with wildtype or mutated PPO sequences by floral dip method as described by McElver and Singh (WO 2008/124495). Transgenic Arabidopsis plants are subjected to TaqMan analysis for analysis of the number of integration loci. Transformation of Oryza sativa (rice) are done by protoplast transformation as described by Peng et al. (U.S. Pat. No. 6,653,529) T0 or T1 transgenic plant of soybean, corn, and rice containing mutated PPO sequences are tested for improved tolerance to PPO-derived herbicides in greenhouse studies and mini-plot studies with the following PPO-inhibiting herbicides: saflufenacil, 1,5-dimethyl-6-thioxo-3-(2,2,7-trifluoro-3-oxo-4-(prop-2-ynyl)-3,4-dihydro-2H-benzo[b][1,4]oxazin-6-yl)-1,3,5-triazinane-2,4-dione (CAS 1258836-72-4), flumioxazin, butafenacil, acifluorfen, lactofen, bifenox, sulfentrazone, and photosynthesis inhibitor diuron as negative control.

[1368] Transgenic Arabidopsis thaliana plants are assayed for improved tolerance to saflufenacil, 1,5-dimethyl-6-thioxo-3-(2,2,7-trifluoro-3-oxo-4-(prop-2-ynyl)-3,4-dihydro-2H-benzo[b][1,4]oxazin-6-yl)-1,3,5-triazinane-2,4-dione (CAS 1258836-72-4), flumioxazin, butafenacil, acifluorfen, lactofen, bifenox, sulfentrazone, and photosynthesis inhibitor diuron as negative control in 48-well plates. Therefore, T2 seeds are surface sterilized by stirring for 5 min in ethanol+water (70+30 by volume), rinsing one time with ethanol+water (70+30 by volume) and two times with sterile, deionized water. The seeds are resuspended in 0.1% agar dissolved in water (w/v) Four to five seeds per well are plated on solid nutrient medium consisting of half-strength murashige skoog nutrient solution, pH 5.8 (Murashige and Skoog (1962) Physiologia Plantarum 15: 473-497). Compounds are dissolved in dimethylsulfoxid (DMSO) and added to the medium prior solidification (final DMSO concentration 0.1%). Multi well plates are incubated in a growth chamber at 22° C., 75% relative humidity and 110 pmol Phot*m⁻²*s⁻¹ with 14:10 h light:dark photoperiod. Growth inhibition is evaluated seven to ten days after seeding in comparison to wild type plants. The results are shown in Table 3 below.

TABLE 3

| Species | Gene | Saflufenacil | BAS 850H |
|---|---|---|---|
| Rhodotermus marinus | RHOMA_PPO_wt_tpFNR | 1 | 1 |
| (SEQ ID NO: 3 oder 5) | | | |
| Rhodotermus marinus | RHOMA_PPO_F353V_tpFNR | 1 | 1 |
| (SEQ ID NO: 3 oder 5) | | | |
| Opitutus marinus | OPITE_PPO_wt_tpFNR | 14 | 9 |
| (SEQ ID NO: 9) | | | |
| Chloroflexus sp. | CHLSP_PPO_wt_tpFNR | 640 | 1500 |
| (SEQ ID NO: 21) | | | |
| Escherichia coli | hemG_tpFNR | 332 | 4433 |
| (SEQ ID NO: 184) | | | |
| Hydrogenobacter | HYDTH_PPO_wt_tpFNR | 10 | |
| thermophilus | | | |
| (SEQ ID NO: 27) | | | |
| Laribacter hongkongensis | LARHO_PPO_wt_tpFNR | 1 | |
| (SEQ ID NO: 34) | | | |
| Calditerrivibrio | CALNI_PPO_wt_tpFNR | 1 | |
| nitroreducens | | | |
| (SEQ ID NO: 48) | | | |
| Candidatus | CANME_PPO_wt_tpFNR | 1 | |
| methylomirabilis | | | |
| (SEQ ID NO: 54 or 57) | | | |
| Acinetobacter baylyi | ACIBA_hemJ_wt_tpFNR | 1 | |
| (SEQ ID NO: 312) | | | |

[1369] Additionally, transgenic T1 Arabidopsis plants are tested for improved tolerance to PPO-inhibiting herbicides in greenhouse studies with the following PPO-inhibiting herbicides: saflufenacil, 1,5-dimethyl-6-thioxo-3-(2,2,7-trifluoro-3-oxo-4-(prop-2-ynyl)-3,4-dihydro-2H-benzo[b][1,4]oxazin-6-yl)-1,3,5-triazinane-2,4-dione (CAS 1258836-72-4), flumioxazin, butafenacil, acifluorfen, lactofen, bifenox, sulfentrazone, and photosynthesis inhibitor diuron as negative control.

### Example 6

### Tissue Culture Conditions

[1370] An in vitro tissue culture mutagenesis assay has been developed to isolate and characterize plant tissue (e.g., maize, rice tissue) that is tolerant to protoporphyrinogen oxidase inhibiting herbicides, (saflufenacil, 1,5-dimethyl-6-thioxo-3-(2,2,7-trifluoro-3-oxo-4-(prop-2-ynyl)-3,4-dihydro-2H-benzo[b][1,4]oxazin-6-yl)-1,3,5-triazinane-2,4-dione (CAS 1258836-72-4), flumioxazin, butafenacil, acifluorfen, lactofen, bifenox, sulfentrazone, and photosynthesis inhibitor diuron as negative control). The assay utilizes the somaclonal variation that is found in in vitro tissue culture. Spontaneous mutations derived from somaclonal variation can be enhanced by chemical mutagenesis and subsequent selection in a stepwise manner, on increasing concentrations of herbicide.

[1371] The present invention provides tissue culture conditions for encouraging growth of friable, embryogenic maize or rice callus that is regenerable. Calli are initiated from 4 different maize or rice cultivars encompassing Zea mays and Japonica (Taipei 309, Nipponbare, Koshihikari) and Indica (Indica 1) varieties, respectively. Seeds are surface sterilized in 70% ethanol for approximately 1 min followed by 20% commercial Clorox bleach for 20 minutes. Seeds are rinsed with sterile water and plated on callus induction media. Various callus induction media are tested. The ingredient lists for the media tested are presented in Table y.

TABLE 4

| Ingredient | Supplier | R001M | R025M | R026M | R327M | R008M | MS711R |
|---|---|---|---|---|---|---|---|
| B5 Vitamins | Sigma | | | | | 1.0 X | |
| MS salts | Sigma | | | 1.0 X | 1.0 X | 1.0 X | 1.0 X |
| MS Vitamins | Sigma | | | 1.0 X | 1.0 X | | |
| N6 salts | Phytotech | 4.0 g/L | 4.0 g/L | | | | |
| N6 vitamins | Phytotech | 1.0 X | 1.0 X | | | | |
| L-Proline | Sigma | 2.9 g/L | 0.5 g/L | | | | 1.2 g/L |
| Casamino Acids | BD | 0.3 g/L | 0.3 g/L | 2 g/L | | | |
| Casein | Sigma | | | | | | 1.0 g/L |
| Hydrolysate | | | | | | | |
| L-Asp | Phytotech | | | | | | 150 mg/L |
| Monohydrate | | | | | | | |
| Nicotinic Acid | Sigma | | | | | | 0.5 mg/L |
| Pyridoxine HCl | Sigma | | | | | | 0.5 mg/L |
| Thiamine HCl | Sigma | | | | | | 1.0 mg/L |
| Myo-inositol | Sigma | | | | | | 100 mg/L |
| MES | Sigma | 500 mg/L | 500 mg/L | 500 mg/L | 500 mg/L | 500 mg/L | 500 mg/L |
| Maltose | VWR | 30 g/L | 30 g/L | 30 g/L | 30 g/L | | |
| Sorbitol | Duchefa | | | 30 g/L | | | |
| Sucrose | VWR | | | | | 10 g/L | 30 g/L |
| NAA | Duchefa | | | | | 50 μg/L | |
| 2,4-D | Sigma | 2.0 mg/L | | | | | 1.0 mg/L |
| MgCl₂•6H₂O | VWR | | | | | 750 mg/L | |
| →pH | | 5.8 | 5.8 | 5.8 | 5.8 | 5.8 | 5.7 |
| Gelrite | Duchefa | 4.0 g/L | | | | 2.5 g/L | |
| Agarose Type1 | Sigma | | 7.0 g/L | 10 g/L | 10 g/L | | |
| →Autoclave | | 15 min | 15 min | 15 min | 15 min | 15 min | 20 min |
| Kinetin | Sigma | | 2.0 mg/L | 2.0 mg/L | | | |
| NAA | Duchefa | | 1.0 mg/L | 1.0 mg/L | | | |
| ABA | Sigma | | 5.0 mg/L | | | | |
| Cefotaxime | Duchefa | | 0.1 g/L | 0.1 g/L | 0.1 g/L | | |
| Vancomycin | Duchefa | | 0.1 g/L | 0.1 g/L | 0.1 g/L | | |
| G418 Disulfate | Sigma | | 20 mg/L | 20 mg/L | 20 mg/L | | |

[1372] R001 M callus induction media is selected after testing numerous variations. Cultures are kept in the dark at 30° C. Embryogenic callus is subcultured to fresh media after 10-14 days.

### Example 7

### Selection of Herbicide-Tolerant Calli

[1373] Once tissue culture conditions are determined, further establishment of selection conditions are established through the analysis of tissue survival in kill curves with saflufenacil, 1,5-dimethyl-6-thioxo-3-(2,2,7-trifluoro-3-oxo-4-(prop-2-ynyl)-3,4-dihydro-2H-benzo[b][1,4]oxazin-6-yl)-1,3,5-triazinane-2,4-dione (CAS 1258836-72-4), flumioxazin, butafenacil, acifluorfen, lactofen, bifenox, sulfentrazone, and photosynthesis inhibitor diuron as negative control. Careful consideration of accumulation of the herbicide in the tissue, as well as its persistence and stability in the cells and the culture media is performed. Through these experiments, a sub-lethal dose has been established for the initial selection of mutated material. After the establishment of the starting dose of saflufenacil, 1,5-dimethyl-6-thioxo-3-(2,2,7-trifluoro-3-oxo-4-(prop-2-ynyl)-3,4-dihydro-2H-benzo[b][1,4]oxazin-6-yl)-1,3,5-triazinane-2,4-dione (CAS 1258836-72-4), flumioxazin, butafenacil, acifluorfen, lactofen, bifenox, sulfentrazone, and photosynthesis inhibitor diuron as negative control in selection media, the tissues are selected in a step-wise fashion by increasing the concentration of the PPO inhibitor with each transfer until cells are recovered that grew vigorously in the presence of toxic doses. The resulting calli are further subcultured every 3-4 weeks to R001 M with selective agent. Over 26,000 calli are subjected to selection for 4-5 subcultures until the selective pressure is above toxic levels as determined by kill curves and observations of continued culture. Alternatively, liquid cultures initiated from calli in MS711R with slow shaking and weekly subcultures. Once liquid cultures are established, selection agent is added directly to the flask at each subculture. Following 2-4 rounds of liquid selection, cultures are transferred to filters on solid R001M media for further growth.

### Example 8

### Regeneration of Plants

[1374] Tolerant tissue is regenerated and characterized molecularly for PPO gene sequence mutations and/or biochemically for altered PPO activity in the presence of the selective agent. In addition, genes involved directly and/or indirectly in tetrapyrrole biosynthesis and/or metabolism pathways are also sequenced to characterize mutations. Finally, enzymes that change the fate (e.g. metabolism, translocation, transportation) are also sequence to characterized mutations. Following herbicide selection, calli are regenerated using a media regime of R025M for 10-14 days, R026M for ca. 2 weeks, R327M until well formed shoots are developed, and R008S until shoots are well rooted for transfer to the greenhouse. Regeneration is carried out in the light. No selection agent is included during regeneration. Once strong roots are established, M0 regenerants are transplant to the greenhouse in square or round pots. Transplants are maintained under a clear plastic cup until they are adapted to greenhouse conditions. The greenhouse is set to a day/night cycle of 27° C./21° C. (80° F./70° F.) with 600 W high pressure sodium lights supplementing light to maintain a 14 hour day length. Plants are watered according to need, depending in the weather and fertilized daily.

### Example 9

### Sequence Analysis

[1375] Leaf tissue is collected from clonal plants separated for transplanting and analyzed as individuals. Genomic DNA is extracted using a Wizard® 96 Magnetic DNA Plant System kit (Promega, U.S. Pat. Nos. 6,027,945 & 6,368,800) as directed by the manufacturer. Isolated DNA is PCR amplified using the appropriate forward and reverse primer.

[1376] PCR amplification is performed using Hotstar Taq DNA Polymerase (Qiagen) using touchdown thermocycling program as follows: 96° C. for 15 min, followed by 35 cycles (96° C., 30 sec; 58° C.-0.2° C. per cycle, 30 sec; 72° C., 3 min and 30 sec), 10 min at 72° C. PCR products are verified for concentration and fragment size via agarose gel electrophoresis. Dephosphorylated PCR products are analyzed by direct sequence using the PCR primers (DNA Landmarks, or Entelechon). Chromatogram trace files (.scf) are analyzed for mutation relative to the wild-type gene using Vector NTI Advance 10™ (Invitrogen). Based on sequence information, mutations are identified in several individuals. Sequence analysis is performed on the representative chromatograms and corresponding AlignX alignment with default settings and edited to call secondary peaks.

### Example 10

### Demonstration of Herbicide-Tolerance

[1377] T0 or T1 transgenic plant of soybean, corn, Canola varieties and rice containing PPO1 and or PPO2 sequences are tested for improved tolerance to herbicides in greenhouse studies and mini-plot studies with the following herbicides: saflufenacil, 1,5-dimethyl-6-thioxo-3-(2,2,7-trifluoro-3-oxo-4-(prop-2-ynyl)-3,4-dihydro-2H-benzo[b][1,4]oxazin-6-yl)-1,3,5-triazinane-2,4-dione (CAS 1258836-72-4), flumioxazin, butafenacil, acifluorfen, lactofen, bifenox, sulfentrazone, and photosynthesis inhibitor diuron as negative control. For the pre-emergence treatment, the herbicides are applied directly after sowing by means of finely distributing nozzles. The containers are irrigated gently to promote germination and growth and subsequently covered with transparent plastic hoods until the plants have rooted. This cover causes uniform germination of the test plants, unless this has been impaired by the herbicides. For post emergence treatment, the test plants are first grown to a height of 3 to 15 cm, depending on the plant habit, and only then treated with the herbicides. For this purpose, the test plants are either sown directly, and grown in the same containers or they are first grown separately and transplanted into the test containers a few days prior to treatment.

[1378] For testing of T0 plants, cuttings can be used. In the case of soybean plants, an optimal shoot for cutting is about 7.5 to 10 cm tall, with at least two nodes present. Each cutting is taken from the original transformant (mother plant) and dipped into rooting hormone powder (indole-3-butyric acid, IBA). The cutting is then placed in oasis wedges inside a bio-dome. Wild type cuttings are also taken simultaneously to serve as controls. The cuttings are kept in the bio-dome for 5-7 days and then transplanted to pots and then acclimated in the growth chamber for two more days. Subsequently, the cuttings are transferred to the greenhouse, acclimated for approximately 4 days, and then subjected to spray tests as indicated. Depending on the species, the plants are kept at 10-25° C. or 20-35° C. The test period extends over 3 weeks. During this time, the plants are tended and their response to the individual treatments is evaluated. Herbicide injury evaluations are taken at 2 and 3 weeks after treatment. Plant injury is rated on a scale of 0% to 100%, 0% being no injury and 100% being complete death.

### Example 11

### Herbicide Selection Using Tissue Culture

[1379] Media is selected for use and kill curves developed as specified above. For selection, different techniques are utilized. Either a step wise selection is applied, or an immediate lethal level of herbicide is applied. In either case, all of the calli are transferred for each new round of selection. Selection is 4-5 cycles of culture with 3-5 weeks for each cycle. Cali are placed onto nylon membranes to facilitate transfer (200 micron pore sheets, Biodesign, Saco, Me.). Membranes are cut to fit 100×20 mm Petri dishes and are autoclaved prior to use 25-35 calli (average weight/calli being 22 mg) are utilized in every plate. In addition, one set of calli are subjected to selection in liquid culture media with weekly subcultures followed by further selection on semi-solid media. Mutant lines are selected using saflufenacil, 1,5-dimethyl-6-thioxo-3-(2,2,7-trifluoro-3-oxo-4-(prop-2-ynyl)-3,4-dihydro-2H-benzo[b][1,4]oxazin-6-yl)-1,3,5-triazinane-2,4-dione (CAS 1258836-72-4), flumioxazin, butafenacil, acifluorfen, lactofen, bifenox, sulfentrazone, and photosynthesis inhibitor diuron as negative control. Efficiencies of obtaining mutants is high either based on a percentage of calli that gave rise to a regenerable, mutant line or the number of lines as determined by the gram of tissue utilized.

### Example 12

### Maize Whole Plant Transformation and PPO Inhibitor Tolerance Testing

[1380] Immature embryos are transformed according to the procedure outlined in Peng et al. (WO2006/136596). Plants are tested for the presence of the T-DNA by Taqman analysis with the target being the nos terminator which is present in all constructs. Healthy looking plants are sent to the greenhouse for hardening and subsequent spray testing. The plants are individually transplanted into MetroMix 360 soil in 4″ pots. Once in the greenhouse (day/night cycle of 27oC/21oC with 14 hour day length supported by 600 W high pressure sodium lights), they are allowed to grow for 14 days. They are then sprayed with a treatment of 25 to 200 g ai/ha saflufenacil+1.0% v/v methylated seed oil (MSO) and/or 25-200 g ai/ha 1,5-dimethyl-6-thioxo-3-(2,2,7-trifluoro-3-oxo-4-(prop-2-ynyl)-3,4-dihydro-2H-benzo[b][1,4]oxazin-6-yl)-1,3,5-triazinane-2,4-dione (CAS 1258836-72-4) plus 1% MSO. Other PPO inhibiting herbicides are also tested in a similar fashion for confirming cross resistance: flumioxazin, butafenacil, acifluorfen, lactofen, bifenox, sulfentrazone, and photosynthesis inhibitor diuron as negative control. Herbicide injury evaluations are taken at 7, 14 and 21 days after treatment. Herbicide injury evaluations are taken 2, 7, 14 and 21 days post-spray to look for injury to new growth points and overall plant health. The top survivors are transplanted into gallon pots filled with MetroMix 360 for seed production.

### Example 13

### Soybean Transformation and PPO Inhibitor Tolerance Testing

[1381] Soybean cv Jake is transformed as previously described by Siminszky et al., Phytochem Rev. 5:445-458 (2006). After regeneration, transformants are transplanted to soil in small pots, placed in growth chambers (16 hr day/8 hr night; 25° C. day/23° C. night; 65% relative humidity; 130-150 microE m-2 s-1) and subsequently tested for the presence of the T-DNA via Taqman analysis. After a few weeks, healthy, transgenic positive, single copy events are transplanted to larger pots and allowed to grow in the growth chamber. An optimal shoot for cutting is about 3-4 inches tall, with at least two nodes present. Each cutting is taken from the original transformant (mother plant) and dipped into rooting hormone powder (indole-3-butyric acid, IBA). The cutting is then placed in oasis wedges inside a bio-dome. The mother plant is taken to maturity in the greenhouse and harvested for seed. Wild type cuttings are also taken simultaneously to serve as negative controls. The cuttings are kept in the bio-dome for 5-7 days and then transplanted to 3 inch pots and then acclimated in the growth chamber for two more days. Subsequently, the cuttings are transferred to the greenhouse, acclimated for approximately 4 days, and then sprayed with a treatment of 0-200 g ai/ha saflufenacil plus 1% MSO and/or 25-200 g ai/ha 1,5-dimethyl-6-thioxo-3-(2,2,7-trifluoro-3-oxo-4-(prop-2-ynyl)-3,4-dihydro-2H-benzo[b][1,4]oxazin-6-yl)-1,3,5-triazinane-2,4-dione (CAS 1258836-72-4) plus 1% MSO. Other PPO inhibiting herbicides are also tested in a similar fashion for confirming cross resistance: flumioxazin, butafenacil, acifluorfen, lactofen, bifenox, sulfentrazone, and photosynthesis inhibitor diuron as negative control. Herbicide injury evaluations are taken at 2, 7, 14 and 21 days after treatment. Results are shown in Table xxx.

| Rating | Phenotype (phytotoxicity) of surviving plants |
|---|---|
| 1 | no obvious damage (no phytotoxicity) |
| 2 | minor amount of leaf damage, plant will survive |
| 3 | moderate amount of leaf damage, plant will survive |
| 4 | severe amount of leaf damage, plant will survive |
| 5 | no surviving plants - all plants dead/dying |

[1382] The following gives a definition of the injury scores measured above:

| Score | Description of injury |
|---|---|
| 0 | No Injury |
| 1 | Minimal injury, only a few patches of leaf injury or chlorosis. |
| 2 | Minimal injury with slightly stronger chlorosis. Overall growth points remain undamaged. |
| 3 | Slightly stronger injury on secondary leaf tissue, but primary leaf and growth points are |
| | still undamaged. |
| 4 | Overall plant morphology is slightly different, some chlorosis and necrosis in secondary |
| | growth points and leaf tissue. Stems are intact. Regrowth is highly probable within 1 week. |
| 5 | Overall plant morphology is clearly different, some chlorosis and necrosis on a few leaves |
| | and growth points, but primary growth point is intact. Stem tissue is still green. Regrowth is |
| | highly probably within 1 week. |
| 6 | Strong injury can be seen on the new leaflet growth. Plant has a high probability to |
| | survive only through regrowth at different growth points. Most of the leaves are chlorotic/ |
| | necrotic but stem tissue is still green. May have regrowth but with noticeable injured |
| | appearance. |
| 7 | Most of the active growth points are necrotic. There may be a single growth point that |
| | could survive and may be partially chlorotic or green and partially necrotic. Two leaves may still |
| | be chlorotic with some green; the rest of the plant including stem is necrotic. |
| 8 | Plant will likely die, and all growth points are necrotic. One leaf may still be chlorotic with |
| | some green. The remainder of the plant is necrotic. |
| 9 | Plant is dead. |

* Not tested

### Example 14

### Transient Protein Expression in Tobacco Leafs

[1383] Transient expression of PPO sequences (e.g. SEQ ID NO: 184) as wildtype or with respective mutations were done as described previously (Voinnet O., et al., 2003, The Plant Journal 33, 949-956). In brief, cloning of GOI and Agrobacterium transformation (strain: GV2260) were done as described in EXAMPLE 5. Young leaves of Nicotiana benthamiana were infiltrated with transgenic Agrobacterium suspension (OD⁶⁰⁰ of 1.0) harboring binary vector constructs containing a GOI gene controlled by a promoter and terminator sequence. 48 h to 72 h after infiltration punches of leave discs (0.75 cm in diameter) were transferred to 6-well plates with medium (half strength Linsmaier-Skoog (Linsmaier and Skoog (1965) Physiol. Plant. 18: 100-127) nutrient solution or water) containing herbicide of interest in different concentrations. Multi well plates were incubated in a growth chamber at 22° C., 75% relative humidity and 110 pmol Phot*m⁻²*s⁻¹ with 14:10 h light:dark photoperiod.

### Example 15

### Demonstration of Herbicide Tolerance of Transiently Transformed Tobacco Leaf Discs

[1384] Leaf discs, generated as described in EXAMPLE 14, expressing a protein encoded by GOI, were subjected to analysis on improved tolerance to herbicide treatment. For analysis of herbicide damage, chlorophyll fluorescence were identified as indicative marker (Dayan and Zaccaro (2012) Pest. Biochem. Physiol. 102: 189-197). In addition to monitor herbicide effect by visual inspection the photosynthetic yield of photosystem II were done with a MAXI imaging PAM machine (IMAGINE-PAM M-Series, Walz, Effeltrich, Germany) 48 h after starting herbicide treatment. PSII yield were measured as per manufacturer instructions. Tolerance factors were calculated based on IC_{50 0} values of PSII yield inhibition of transformed versus empty vector-transformed leaf discs. IC₅₀ of PSII yield inhibition in empty vector-transformed leaf discs treated with Saflufenacil or 1,5-dimethyl-6-thioxo-3-(2,2,7-trifluoro-3-oxo-4-(prop-2-ynyl)-3,4-dihydro-2H-benzo[b][1,4]oxazin-6-yl)-1,3,5-triazinane-2,4-dione for 48 h was measured with 1.1*10⁻⁷ M or 1.1*10⁻⁸ M, respectively.

1. A method for controlling undesired vegetation at a plant cultivation site, the method comprising the steps of:
a) providing, at said site, a plant that comprises at least one nucleic acid comprising
a nucleotide sequence encoding a wild-type protoporphyrinogen oxidase or a mutated protoporphyrinogen oxidase (mutated-PPO) which is resistant or tolerant to a “PPO inhibiting herbicide”, and which comprises the amino acid sequence of SEQ ID NO: 1, 2, 3, 4, 5, 6, 7, 8, 9, 10, 11, 12, 13, 14, 15, 16, 17, 18, 19, 20, 21, 22, 23, 24, 25, 26, 27, 28, 29, 30, 31, 32, 33, 34, 35, 36, 37, 38, 39, 40, 41, 42, 43, 44, 45, 46, 47, 48, 49, 50, 51, 52, 53, 54, 55, 56, 57, 58, 59, 60, 61, 62, 63, 64, 65, 66, 67, 68, 69, 70, 71, 72, 73, 74, 75, 76, 77, 78, 79, 80, 81, 82, 83, 84, 85, 86, 87, 88, 89, 90, 91, 92, 93, 94, 95, 96, 97, 98, 99, 100, 101, 102, 103, 104, 105, 106, 107, 108, 109, 110, 111, 112, 113, 114, 115, 116, 117, 118, 119, 120, 121, 122, 123, 124, 125, 126, 127, 128, 129, 130, 131, 132, 133, 134, 135, 136, 137, 138, 139, 140, 141, 142, 143, 144, 145, 146, 147, 148, 149, 150, 151, 152, 153, 154, 155, 156, 157, 158, 159, 160, 161, 162, 163, 164, 165, 166, 167, 168, 169, 170, 171, 172, 173, 174, 175, 176, 177, 178, 179, 180, 181, 182, 183, 184, 185, 186, 187, 188, 189, 190, 191, 192, 193, 194, 195, 196, 197, 198, 199, 200, 201, 202, 203, 204, 205, 206, 207, 208, 209, 210, 211, 212, 213, 214, 215, 216, 217, 218, 219, 220, 221, 222, 223, 224, 225, 226, 227, 228, 229, 230, 231, 232, 233, 234, 235, 236, 237, 238, 239, 240, 241, 242, 243, 244, 245, 246, 247, 248, 249, 250, 251, 252, 253, 254, 255, 256, 257, 258, 259, 260, 261, 262, 263, 264, 265, 266, 267, 268, 269, 270, 271, 272, 273, 274, 275, 276, 277, 278, 279, 280, 281, 282, 283, 284, 285, 286, 287, 288, 289, 290, 291, 292, 293, 294, 295, 296, 297, 298, 299, 300, 301, 312, or 313, or a variant thereof;
b) applying to said site an effective amount of said herbicide.

2. The method according to claim 1, wherein the mutated-PPO of SEQ ID NO: 1, 2, 3, 4, 5, 6, 7, 8, 9, 10, 11, 12, 13, 14, 15, 16, 17, 18, 19, 20, 21, 22, 23, 24, 25, 26, 27, 28, 29, 30, 31, 32, 33, 34, 35, 36, 37, 38, 39, 40, 41, 42, 43, 44, 45, 46, 47, 48, 49, 50, 51, 52, 53, 54, 55, 56, 57, 58, 59, 60, 61, 62, 63, 64, 65, 66, 67, 68, 69, 70, 71, 72, 73, 74, 75, 76, 77, 78, 79, 80, 81, 82, 83, 84, 85, 86, 87, 88, 89, 90, 91, 92, 93, 94, 95, 96, 97, 98, 99, 100, 101, 102, 103, 104, 105, 106, 107, 108, 109, 110, 111, 112, 113, 114, 115, 116, 117, 118, 119, 120, 121, 122, 123, 124, 125, 126, 127, 128, 129, 130, 131, 132, 133, 134, 135, 136, 137, 138, 139, 140, 141, 142, 143, 144, 145, 146, 147, 148, 149, 150, 151, 152, 153, 154, 155, 156, 157, 158, 159, 160, 161, 162, 163, 164, 165, 166, 167, 168, 169, 170, 171, 172, 173, 174, 175, 176, 177, 178, 179, 180, 181, 182, 183, 184, 185, 186, 187, 188, 189, 190, 191, 192, 193, 194, 195, 196, 197, 198, 199, 200, 201, 202, 203, 204, 205, 206, 207, 208, 209, 210, 211, 212, 213, 214, 215, 216, 217, 218, 219, 220, 221, 222, 223, 224, 225, 226, 227, 228, 229, 230, 231, 232, 233, 234, 235, 236, 237, 238, 239, 240, 241, 242, 243, 244, 245, 246, 247, 248, 249, 250, 251, 252, 253, 254, 255, 256, 257, 258, 259, 260, 261, 262, 263, 264, 265, 266, 267, 268, 269, 270, 271, 272, 273, 274, 275, 276, 277, 278, 279, 280, 281, 282, 283, 284, 285, 286, 287, 288, 289, 290, 291, 292, 293, 294, 295, 296, 297, 298, 299, 300, 301, 312, or 313 comprises one or more of the following:
a) the amino acid at Mutated-site 1 corresponding to Arg128 of SEQ ID NO: 1 is Leu, Ala, Val, Ile, Met, Tyr, Gly, Asn, Cys, Phe, Ser, Thr, Gln, or His;
b) the amino acid at Mutated-site 4 corresponding to Leu397 of SEQ ID NO: 1 is Ala, Arg, Val, Ile, Met, His, Lys, Asp, Glu, Ser, Thr, Asn, Gln, Cys, Gly, Pro, Phe, Tyr, or Trp;
c) the amino acid at Mutated-site 5 corresponding to Phe420 of SEQ ID NO: 1 is Ala, Leu, Val, Ile, Met, His, Lys, Asp, Glu, Ser, Thr, Asn, Gln, Cys, Gly, Pro, Arg, Tyr, or Trp.

3. The method according to claim 1, wherein the plant comprises at least one additional heterologous nucleic acid comprising a nucleotide sequence encoding a herbicide tolerance enzyme.

4. The method according to claim 1 wherein the PPO inhibiting herbicide is applied in conjunction with one or more additional herbicides.

5. A transgenic plant cell comprising a nucleic acid encoding a mutated-PPO polypeptide, wherein expression of the nucleic acid in the plant cell results in increased resistance or tolerance to a PPO inhibiting herbicide as compared to a wild type variety of the plant cell, and wherein the encoded mutated-PPO is a variant of SEQ ID NO: 1, 2, 3, 4, 5, 6, 7, 8, 9, 10, 11, 12, 13, 14, 15, 16, 17, 18, 19, 20, 21, 22, 23, 24, 25, 26, 27, 28, 29, 30, 31, 32, 33, 34, 35, 36, 37, 38, 39, 40, 41, 42, 43, 44, 45, 46, 47, 48, 49, 50, 51, 52, 53, 54, 55, 56, 57, 58, 59, 60, 61, 62, 63, 64, 65, 66, 67, 68, 69, 70, 71, 72, 73, 74, 75, 76, 77, 78, 79, 80, 81, 82, 83, 84, 85, 86, 87, 88, 89, 90, 91, 92, 93, 94, 95, 96, 97, 98, 99, 100, 101, 102, 103, 104, 105, 106, 107, 108, 109, 110, 111, 112, 113, 114, 115, 116, 117, 118, 119, 120, 121, 122, 123, 124, 125, 126, 127, 128, 129, 130, 131, 132, 133, 134, 135, 136, 137, 138, 139, 140, 141, 142, 143, 144, 145, 146, 147, 148, 149, 150, 151, 152, 153, 154, 155, 156, 157, 158, 159, 160, 161, 162, 163, 164, 165, 166, 167, 168, 169, 170, 171, 172, 173, 174, 175, 176, 177, 178, 179, 180, 181, 182, 183, 184, 185, 186, 187, 188, 189, 190, 191, 192, 193, 194, 195, 196, 197, 198, 199, 200, 201, 202, 203, 204, 205, 206, 207, 208, 209, 210, 211, 212, 213, 214, 215, 216, 217, 218, 219, 220, 221, 222, 223, 224, 225, 226, 227, 228, 229, 230, 231, 232, 233, 234, 235, 236, 237, 238, 239, 240, 241, 242, 243, 244, 245, 246, 247, 248, 249, 250, 251, 252, 253, 254, 255, 256, 257, 258, 259, 260, 261, 262, 263, 264, 265, 266, 267, 268, 269, 270, 271, 272, 273, 274, 275, 276, 277, 278, 279, 280, 281, 282, 283, 284, 285, 286, 287, 288, 289, 290, 291, 292, 293, 294, 295, 296, 297, 298, 299, 300, 301, 312, or 313.

6. A transgenic plant comprising a plant cell as defined in claim 5, wherein expression of the mutated-PPO polypeptide encoding nucleic acid in the plant results in the plant's increased resistance to PPO inhibiting herbicide as compared to a wild type plant.

7. A plant that expresses a mutagenized or recombinant mutated-PPO polypeptide comprising the sequence of SEQ ID NO: 1, 2, 3, 4, 5, 6, 7, 8, 9, 10, 11, 12, 13, 14, 15, 16, 17, 18, 19, 20, 21, 22, 23, 24, 25, 26, 27, 28, 29, 30, 31, 32, 33, 34, 35, 36, 37, 38, 39, 40, 41, 42, 43, 44, 45, 46, 47, 48, 49, 50, 51, 52, 53, 54, 55, 56, 57, 58, 59, 60, 61, 62, 63, 64, 65, 66, 67, 68, 69, 70, 71, 72, 73, 74, 75, 76, 77, 78, 79, 80, 81, 82, 83, 84, 85, 86, 87, 88, 89, 90, 91, 92, 93, 94, 95, 96, 97, 98, 99, 100, 101, 102, 103, 104, 105, 106, 107, 108, 109, 110, 111, 112, 113, 114, 115, 116, 117, 118, 119, 120, 121, 122, 123, 124, 125, 126, 127, 128, 129, 130, 131, 132, 133, 134, 135, 136, 137, 138, 139, 140, 141, 142, 143, 144, 145, 146, 147, 148, 149, 150, 151, 152, 153, 154, 155, 156, 157, 158, 159, 160, 161, 162, 163, 164, 165, 166, 167, 168, 169, 170, 171, 172, 173, 174, 175, 176, 177, 178, 179, 180, 181, 182, 183, 184, 185, 186, 187, 188, 189, 190, 191, 192, 193, 194, 195, 196, 197, 198, 199, 200, 201, 202, 203, 204, 205, 206, 207, 208, 209, 210, 211, 212, 213, 214, 215, 216, 217, 218, 219, 220, 221, 222, 223, 224, 225, 226, 227, 228, 229, 230, 231, 232, 233, 234, 235, 236, 237, 238, 239, 240, 241, 242, 243, 244, 245, 246, 247, 248, 249, 250, 251, 252, 253, 254, 255, 256, 257, 258, 259, 260, 261, 262, 263, 264, 265, 266, 267, 268, 269, 270, 271, 272, 273, 274, 275, 276, 277, 278, 279, 280, 281, 282, 283, 284, 285, 286, 287, 288, 289, 290, 291, 292, 293, 294, 295, 296, 297, 298, 299, 300, 301, 312, or 313, a variant, derivative, orthologue, paralogue or homologue thereof, in which the amino acid at amino acid at Mutated-site 1 corresponding to Arg128 of SEQ ID NO: 1 is Leu, Ala, Val, Ile, Met, Tyr, Gly, Asn, Cys, Phe, Ser, Thr, Gln, or His; and/or the amino acid at Mutated-site 4 corresponding to Leu397 of SEQ ID NO: 1 is Ala, Arg, Val, Ile, Met, His, Lys, Asp, Glu, Ser, Thr, Asn, Gln, Cys, Gly, Pro, Phe, Tyr, or Trp; and/or the amino acid at Mutated-site 5 corresponding to Phe420 of SEQ ID NO: 1 is Ala, Leu, Val, Ile, Met, His, Lys, Asp, Glu, Ser, Thr, Asn, Gln, Cys, Gly, Pro, Arg, Tyr, or Trp, and wherein said mutated-PPO confers upon the plant increased herbicide tolerance as compared to the corresponding wild-type variety of the plant when expressed therein.

8. A seed produced by a transgenic plant comprising a plant cell as defined in claim 5 or by a plant, wherein the seed is true breeding for an increased resistance to a PPO inhibiting herbicide as compared to a wild type variety of the seed.

9. A method of producing a transgenic plant cell with an increased resistance to a PPO inhibiting herbicide as compared to a wild type variety of the plant cell comprising, transforming the plant cell with an expression cassette comprising a nucleic acid encoding a mutated-PPO polypeptide comprising the sequence of SEQ ID NO: 1, 2, 3, 4, 5, 6, 7, 8, 9, 10, 11, 12, 13, 14, 15, 16, 17, 18, 19, 20, 21, 22, 23, 24, 25, 26, 27, 28, 29, 30, 31, 32, 33, 34, 35, 36, 37, 38, 39, 40, 41, 42, 43, 44, 45, 46, 47, 48, 49, 50, 51, 52, 53, 54, 55, 56, 57, 58, 59, 60, 61, 62, 63, 64, 65, 66, 67, 68, 69, 70, 71, 72, 73, 74, 75, 76, 77, 78, 79, 80, 81, 82, 83, 84, 85, 86, 87, 88, 89, 90, 91, 92, 93, 94, 95, 96, 97, 98, 99, 100, 101, 102, 103, 104, 105, 106, 107, 108, 109, 110, 111, 112, 113, 114, 115, 116, 117, 118, 119, 120, 121, 122, 123, 124, 125, 126, 127, 128, 129, 130, 131, 132, 133, 134, 135, 136, 137, 138, 139, 140, 141, 142, 143, 144, 145, 146, 147, 148, 149, 150, 151, 152, 153, 154, 155, 156, 157, 158, 159, 160, 161, 162, 163, 164, 165, 166, 167, 168, 169, 170, 171, 172, 173, 174, 175, 176, 177, 178, 179, 180, 181, 182, 183, 184, 185, 186, 187, 188, 189, 190, 191, 192, 193, 194, 195, 196, 197, 198, 199, 200, 201, 202, 203, 204, 205, 206, 207, 208, 209, 210, 211, 212, 213, 214, 215, 216, 217, 218, 219, 220, 221, 222, 223, 224, 225, 226, 227, 228, 229, 230, 231, 232, 233, 234, 235, 236, 237, 238, 239, 240, 241, 242, 243, 244, 245, 246, 247, 248, 249, 250, 251, 252, 253, 254, 255, 256, 257, 258, 259, 260, 261, 262, 263, 264, 265, 266, 267, 268, 269, 270, 271, 272, 273, 274, 275, 276, 277, 278, 279, 280, 281, 282, 283, 284, 285, 286, 287, 288, 289, 290, 291, 292, 293, 294, 295, 296, 297, 298, 299, 300, 301, 312, or 313, a variant, derivative, orthologue, paralogue or homologue thereof.

10. A method of producing a transgenic plant comprising, (a) transforming a plant cell with an expression cassette comprising a nucleic acid encoding a mutated-PPO polypeptide comprising the sequence of SEQ ID NO: 1, 2, 3, 4, 5, 6, 7, 8, 9, 10, 11, 12, 13, 14, 15, 16, 17, 18, 19, 20, 21, 22, 23, 24, 25, 26, 27, 28, 29, 30, 31, 32, 33, 34, 35, 36, 37, 38, 39, 40, 41, 42, 43, 44, 45, 46, 47, 48, 49, 50, 51, 52, 53, 54, 55, 56, 57, 58, 59, 60, 61, 62, 63, 64, 65, 66, 67, 68, 69, 70, 71, 72, 73, 74, 75, 76, 77, 78, 79, 80, 81, 82, 83, 84, 85, 86, 87, 88, 89, 90, 91, 92, 93, 94, 95, 96, 97, 98, 99, 100, 101, 102, 103, 104, 105, 106, 107, 108, 109, 110, 111, 112, 113, 114, 115, 116, 117, 118, 119, 120, 121, 122, 123, 124, 125, 126, 127, 128, 129, 130, 131, 132, 133, 134, 135, 136, 137, 138, 139, 140, 141, 142, 143, 144, 145, 146, 147, 148, 149, 150, 151, 152, 153, 154, 155, 156, 157, 158, 159, 160, 161, 162, 163, 164, 165, 166, 167, 168, 169, 170, 171, 172, 173, 174, 175, 176, 177, 178, 179, 180, 181, 182, 183, 184, 185, 186, 187, 188, 189, 190, 191, 192, 193, 194, 195, 196, 197, 198, 199, 200, 201, 202, 203, 204, 205, 206, 207, 208, 209, 210, 211, 212, 213, 214, 215, 216, 217, 218, 219, 220, 221, 222, 223, 224, 225, 226, 227, 228, 229, 230, 231, 232, 233, 234, 235, 236, 237, 238, 239, 240, 241, 242, 243, 244, 245, 246, 247, 248, 249, 250, 251, 252, 253, 254, 255, 256, 257, 258, 259, 260, 261, 262, 263, 264, 265, 266, 267, 268, 269, 270, 271, 272, 273, 274, 275, 276, 277, 278, 279, 280, 281, 282, 283, 284, 285, 286, 287, 288, 289, 290, 291, 292, 293, 294, 295, 296, 297, 298, 299, 300, 301, 312, or 313, a variant, derivative, orthologue, paralogue or homologue thereof, and (b) generating a plant with an increased resistance to PPO inhibiting herbicide from the plant cell.

11. The method of claim 10, wherein the expression cassette further comprises a transcription initiation regulatory region and a translation initiation regulatory region that are functional in the plant.

The application's sequence listing, which the Patent Office published only in electronic form, follows.

SEQUENCE LISTING (314 sequences)

SEQ ID NO: 1 - protein, 534 aa, Amaranthus
MVIQSITHLSPNLALPSPLSVSTKNYPVAVMGNISEREEPTSAKRVAVVGAGVSGLAAAYKLKSHGLSVTLFEADSRAGGKLKTVKKDGFIWDEGANTMTESEAEVSSLIDDLGLREKQQLPISQNKRYIARDGLPVLLPSNPAALLTSNILSAKSKLQIMLEPFLWRKHNATELSDEHVQESVGEFFERHFGKEFVDYVIDPFVAGTCGGDPQSLSMHHTFPEVWNIEKRFGSVFAGLIQSTLLSKKEKGGENASIKKPRVRGSFSFQGGMQTLVDTMCKQLGEDELKLQCEVLSLSYNQKGIPSLGNWSVSSMSNNTSEDQSYDAVVVTAPIRNVKEMKIMKFGNPFSLDFIPEVTYVPLSVMITAFKKDKVKRPLEGFGVLIPSKEQHNGLKTLGTLFSSMMFPDRAPSDMCLFTTFVGGSRNRKLANASTDELKQIVSSDLQQLLGTEDEPSFVNHLFWSNAFPLYGHNYDSVLRAIDKMEKDLPGFFYAGNHKGGLSVGKAMASGCKAAELVISYLDSHIYVKMDEKTA

SEQ ID NO: 2 - protein, 461 aa, Salinibacter
MPNVGIIGAGISGLAAAYRLQEHGHSVRVLEASGHTGGVIRSESSEGFLVEHGPNSIRAGAAGLETLIDALDLHEDRVWANDAADTRYVVRDGRPTPLPRSVGSFLTTDLFSTRAKLRLLAEPFIGRAAAEDESVARFTERRLGPEVLNYAVAPFVGGVFAGRPDDLSVQHAFRRLAALEEESGSLLLGAIRRALTSDDGAPPDTPSGLFSFRNGLQTLPNALADTLGDRIRLNAPVHALTHDGTAWRVTVSPPDAPAHTRSFDALVCTVPLHRLAAMEIDTPVDLAPLGEVTYPPLSVLALGYERDAIDHALDGFGMLVPPVEDTLDVLGTIFSSTLFPGRAPEGHVLLTTFVGGARAPHHATSDAAALQARVARDLDSLLGVDASPVFRRLVHWPHAIPQYELGYGTVKDTFDALEAAHPHLAFAGNYRAGVSVGDALTSGLEAADRLLETDERATQPH

SEQ ID NO: 3 - protein, 469 aa, Rhodothermus
MASVGIIGAGIAGLTAAYELHRRGLEVTVFEATDRIGGFIQSERIDGFLVELGPQTLQRTSGDFEELLRQVDLEDACIPARPVAANRFIVRGGQPIPLPRSPRELLRTPLLSPRARLRLLAEPFIHRAHRSTEESVAKFTRRRLGPEVLDYLVEPFVAGIFAGDPEQLSVRYAFPKLFELEQQYGSLFWGLIRDRMKQRYHPAPRRSMFSFVEGLHMLPRALAERLPAHAIVRNAEVLAIRWDEKNPWTLTFRQHGRASTRFFDIIVCAVPLHRLAQLRIHPPVDRRPLSTVEHPPIALVALGFRREQVAHPLDGFGMLVPAVERDFQILGTLFSSSLFPDRAPEGHVLLTTFVGGMRHPELALLPEDRLEALVLQDLRRLLGISGAPVFRHVWRWERSIPQYRLGYDAVLACVHDVEMSRSGLFLAGNYMEGISVIDALHTGLKAARAIIQHLREEAAGGLAKLVLGD

SEQ ID NO: 4 - protein, 461 aa, Salinibacter
MPNVGIIGAGISGLAAAYRLQEHGHSVRLLEASGHTGGVIRSESSEGFLVEHGPNSIRAGAAGLETLIDALDLHEDRVWANDAADTRYVVRDGRPTPLPRSVGSFLTTDLFSTRAKLRLLAEPFIGRAAAEEESVARFTERRLGPEVLNYAVAPFVGGVFAGRPDDLSVQHAFRRLAALEEESGSLLLGAIRRALTSDDGAPPDTPSGLFSFRNGLQTLPNALADTLGDRIRLNAPVHALAHDGTAWRVTVSPPDAPAHTRSFDALVCTVPLHRLAAMEIDTPVDLAPLGEVTYPPLSVLALGYGRDAIDHALDGFGMLVPPVEDTLDVLGTIFSSTLFPGRAPEGHVLLTTFVGGARAPHHATSDAAALQARVARDLDSLLGVDASPVFRRLVHWPHAIPQYELGYGTVKDTFDALEAAHPHLAFAGNYRAGVSVGDALTSGLEAADRLLETDERAAQPH

SEQ ID NO: 5 - protein, 469 aa, Rhodothermus
MASVGIIGAGIAGLAAAYELHRRGLEVTVFEATDRIGGFIQSERIDGFLVEHGPQTLQRTSGDFEELLRQVDLEDACITARPIAANRFIVRGGRPIPLPRSPRELLRTPLLSPRARLRLLAEPFIHRAHRSTEESVAKFARRRLGPEVLDYLVEPFVAGIFAGDPEQLSVRYAFPKLFELEQQYGSLFWGLIRDRMKQRYHPAPRRSMFSFVEGLHMLPRALADRLPAHAIVRNAEVLAIRWDEKNPWTLTFRQHGRASTRFFDIIVCAVPLHRLAQLRIHPPVDRRPLSTVEHPPIALVALGFRREQVAHPLDGFGMLVPAVERDFQILGTLFSSSLFPDRAPEGHVLLTTFVGGMRHPELALLPEDRLEALVLQDLRRLLGISGAPVFRHVWRWERSIPQYRLGYDAVLACVHDVEMSRSGLFLAGNYMEGISVIDALHTGLKAARAIIQHLREEAAGGLAKLVLGD

SEQ ID NO: 6 - protein, 472 aa, Halothio
MNTHSNASEPINCPYLVIGGGISGLATAYHLSRMGKTVTVLEATSRVGGAVGSIEEDGWLRELGPNSLVQTPEMAALMSALDLVSEIIEANTVAKKRFVAKNGHPVALPGSPLELLTSPLFSMGDLWHLAREAWIKPVNKEETIAEFVRRRLGQGFLDWAVDPFVSGVYAGDPNRLSVQAAIPKIYAFEQESGSLIRGGIAKMKAAKANPAPVTLPAKGKLFSFKRGLQTLTDALATAITSSGRGNIQLDSAITNIQRLPEGGWSVKTVQGKTFHTRQLILSTPAHVSAQLLGEVDGPLAETLAAIEYPPVTSVVMGFDRSEVAHPLDGFGLLLPSKEKKRTLGVLFSSTLFPDRTPAGKVLLSAFIGGRKHPEAAQGDDQELLDRVLGDLSPLLGIKGKPEFLRVKRWQQAIPQYEIGYLELQEKISQRLTALPGLSLNGNWRGGIAVGDCLNNGNKLAERLIENTRTEES

SEQ ID NO: 7 - protein, 441 aa, Coralio
MPDTCIIGAGITGLATAWQYQRKGKDCVVLESGPQVGGAIQSILQDGYLAEEGPNSIQLNSLEIEDFLTSIPGLEAQIIEANPAAQKRYIVRKGRLRAVPMNPLQAITTQLWSIAGKLRVLREPFIKAAPPEPDQSVADFVTRRLGKELYDYAINPLVGGIYAGKPEMLSLRYGFPKLYALEQEHGGLIRGALAKMKAAKANKGPKAKKYILSFKDGLQTLPQSIANNLNEPVQTGVSIESIRQIEDMWAVRWNGQVKAFKELIVTVPAHKLPGLPFEEPIRLPAIDYPPVSVISLGYPLSAIKQPLDGFGALVPEREDRNILGVLFPSAVFDGRAPEGHGLLTVFVGGSRSPECSSPDTDQLLKTIQPDLETLLGIQDEPSFVHHKHWPMAIPQYTLGYEKVLEAITRIEQQYIGLKLAGNYRTGISLSYCLESAIASTN

SEQ ID NO: 8 - protein, 463 aa, Magnetococcus
MTKNPILIIGGGISGLSTAWFLHKKGEKVILLESRDRVGGNIRTSRNPEGYLIEHGPNSTLQKPGDEEDALGRIITDMALESELQEANPLAARRFVMKGGQLHVLPTSPPGFIKTPLFSLSAKLRLCLEPFIGKSEQEESIAQFVIRRLGQEFLDYAIEPFVSGVYAGDPKQLSVRAAVAKIYALEAKYGSLIKGAIALGKIRKAAGMPRGRMISFETGMETLPATIANRLPHQSIHTNAQVTALCQHGAAWQVSWQQGGQHGGEPHSIIASQVVLATPASVSAQLLRPLSPQAADLLESIRYAPVDSVALGYAKQDINHSLDGFGFLIPRKEQVTTLGGLFSTTLFPGRAPQDKALLTCFIGGMTNPSITQWSEEKVVTQVDQDMMAALGIQHGAEYVHLTRYTHAIAQYEQGHLQRVGDIDRALAGYKGLHLRANWRDGVSVSDCVLNGEKSAQKILAGVS

SEQ ID NO: 9 - protein, 467 aa, Opitutus
MSTSPFNPSATASGRPPKTFAVLGAGITGLTAAHRLTQLGHKVRVFEQSDRVGGSIKTEEVDGWLIEGGPNTLLSGELAVDKLIDELGLNGERIAADPAAKNRYIVRRGRALAAPMSPPSFFASSLFSPVAKFKLLAELFARRRVRTTDVSLAEFVESHFGREFVDYALNPFVGGVYAGDPEKLSARQSFPKLWEIEQTHGSLIRGQIAAAKARKARGEPRPGIFSFKHGLHVLPEALAARLPAGAITLGASLDAIVPGDKWNVVWHDDVATHTQSFDSVVVALPAPALARLQIGTLGEKPLAALALIEHPPVSSLFLGFRREQVAHPLDGFGVLVPAVEKRSVLGVLFSSSLFPGRAPLGHVALTVMVGGTRQPQLASLPADQLLAAVRPDLTQLLGVSGDPVFVRHNFWPRAIPQYNLGHEHFIAALAAGERFHPGLFMGGQARDGIAVPACIAAGEKLAERAGQ

SEQ ID NO: 10 - protein, 451 aa, Melioribacter
MSKKIVVLGAGISGLSTAYWLVKKGYDVTILETKNEPGGSMISRRLDNFLIDYGPNSGLETTPLIRKLVEEVNLSDKMIYANAAASKRYILKNGELIPLPMSPGSFIRTKLFSSGAKFRLMAEPFVSKSDDGYYQSIAEFVRRRLGNEFLDYAIDPFVSGVFAGDPEKLSVKSAFPKLYRLEEVYGGLIKGMIKGARERKQRNEESKQSAKMFSFLEGMQSLPNAIADKLKDNIVFSAKVLNVTGANDKQWKVTYELNGNRESITADTVISTLPAYIAAGVFGELDQKLAERLNSIYYPPVMVLYLGYNKKDIKRKLDGFGFLIPSKEKKHFLGAIWSSSIFPGRSPEDMAAFTLFVGGARSPQLFEMEKSDLIKKVLSEFHQIMNIKGEPVLIENKLWQKAIPQYNLGYIEHEKYFEVFEENHRGIYLRGNYRGGISVGDCIKNSELEIK

SEQ ID NO: 11 - protein, 501 aa, Physcomitrella
VAVVGAGVSGLAAAHRLRSAGVAVTVFEAQNAVGGKIQSFSNDGLIWEQGPNTMVETEPEVSSLIDELGLREKQQWPVMQNKRYVVRDGKAVQLPSNPLGLITTKLLSAQAKCQILLEPFLWKRKEVPLKEAANGRENVGNFITRHFGREVVDYLVDPFIAGTSGSDPDSVSIRHTFPDLFAIEERYGSLLIGGVKSSFKKKSGSKKESFKVQSDSAKVTPAQKRPRGSFSFVGGMQTLAHALSERLDEESLELNSSVLNLASDQQGNPSRNNWTVTYKKENSQQKEKHFDAVILTTPLHNLQELGIEKNGIPYALDFIPEIVYQPMSVIVTAFKESDVKNSLKGFGVLVPRMEKKNGFFTLGTMFSSSMFPDRAPPGQVVFTTFVGGSRNRALASAPFEEVKAVALEDLRKIVGVQGPPVAVKHIFWKQAFPQYSLDYNEFLSSLEKMESDLPGLFYAGNHRGGLSVGKSVASGCKAAEHVLSMLEGTGGRKIFTMASTK

SEQ ID NO: 12 - protein, 511 aa, Ricinus
MSSVIKEDRNPSHVKRVAVVGAGVSGLAAAYKLKSHGLKVTVFEAEERAGGKLRSVNHDGLIWDEGANTMTESEMEVKSLIGNLGIREKQQFPISQNKRYIVRNGKPILIPTNPIALITSNILSAQSKFQIILEPFLWKKRESSETHNAYTEESVGEFFQRHFGKEVVDYLIDPFVAGTSAGDPESLSVCHSFPELWNLEKRFGSIIAGVVQAKLSTKRGKSQETKGSSVKKKQQRGSFSFFGGMQTLTDTLCKALAKDELRLESKVFSLSYNPDSKSAVENWSLSYAFKGAKHLQNSSYDAIVMTAPLCNVKEMKITKNRNIFSLNFLPEVSYMPLSVVITTFKKDNVKSPLEGFGVLVPSKEQQNGLKTLGTLFSSMMFPDRAPNDLYLYTTFVGGSRNKELAKASTDDLKQIVTSDLRQLLGAEGEPTFVNHFYWSKAFPLYGRNYDAVLEAIDTMEKDLPGFFYAGNHKGGLSVGKAIASGCKAADLVISYLESSSDDKMLKEGPSN

SEQ ID NO: 13 - protein, 476 aa, Chromohalobacter
MQHEEQLDATDQAVGEARRDVVVVGGGASGLAAARAAARRGLAVSVLERGSHAGGNLRTHRDGAWQVEVGPNTLVMKPPLHTLLDELGLLDEAQPANPDARRRYIAFHGRPVALPTHVLKAPANPLIGLRGSWSVLREPFRAGPPRDEESLADFVVRRLGRHVLDHLVDPFVSGVYAGDPARLSAQAAMPRLVALEREYGSLVRGGLRRLRQSRREPPALPREWRGQLVSFPAGLQRLAERLAEDIADQPGASVQCGCEVVAVGREADGWQVETAAGQRIRTRELVLAVPAPTAAALLAPLDAALAAPLEEIAYPPVNAVSVGFRRADVDHPLDGFGMLIPGVERRRTLGALFSSTLFPGRAPSDHVLLTAFLGGRRQPEAAAGDDAEQVAQVVADLGDLLGIHAEPVWQCVSRWPQAIPQYERGHLARIAALDAALEAHPGLSLLGNWRDGIAVGDCLENGRRLGERLAETPDRR

SEQ ID NO: 14 - protein, 462 aa, Leptospirillum
MAGFDCDTLVVGGGVSGLAAALTLKNRGVDVRLLESRGYLGGAIRTVREDGYLLEFGPNSLMVRPEDAIDTVLGDPELRARIVPASGLSKNRYVVKAGHLYPVPLSPWAFFRTPLLSWRGRRDILSEWKVPPRTGGPEETLSHFVRRRLGEEALDYFVDPFVKGVYASHPDLLSVEAAFPLLVRLEREHGGLLRGALKTFLKRRKRPSGSSPRGIFSFAGGMTDLVEAMGKRLGEDVGTNVDVIKYTRLEEGFRVALMYDETEYYMTSRRLILATSAPQAAELLEGDPDGPSSELKSIPYAPVTIAYAGFLREQVTHPLDGFGLLCPTVENRKVLGVIFSSSLFPGRAPEGKVLLTVFVGGMTGQKLAQAFDEDLERIVLKELTELLGVKGAPSFFRIHRWEKAIPQLILGHRETVRTIRKKLPSGLRLAGNYLDGISIARAFASGVRAAEELLSEDGGTPG

SEQ ID NO: 15 - protein, 514 aa, Selaginella
MAMAEGETVPVLGSVAVVGAGASGLAAAYRLRAAGVSVTVYEAENSIGGKLKSVSENGFIWEKGPNTMTENDPSISRMFDDLHLRDKQQFPVEQKKRYIVRNASPTMLPSNPLGFITTGLFSAQAKLKLLTEPFSWKRTKAESNEDESVGAFMERHFGDEIVDYAVDPFVAGTSGSDPSSISIRHSFPELWSLEKNYGSLFVGAIKSGFSKKKKQKLRPVEFEDEDSDFPARTRPRRGGSFSFVGGMQTLANELVSRIGKEKFKLNTFVTGLACNQQGNPSRQSWTVTGLETSGKRSKRSDKTFDAVIMTAPVDDVRTMKVVKDGKPYALDYLPTVIYEPMSVLITMFNKDSVKRALPGFGVLVPSKEQQANGFQTLGTLFSSFMFPDRAPEDQLLFTTFIGGSRNTLLASRSKEELLDVTLKDLSRLIGVEGQPTAMRHVYWEKAFPRYSIGYDNVLNSIQKLESDLPGLFYAGNHRGGLAVGKTIVSGLDAAEQVLQYLQGSGGKKVFTMAS

SEQ ID NO: 16 - protein, 520 aa, Selaginella
MAMAEGETAPVLGSVAVVGAGASGLAAAYRLRAAGVSVTVYEAENSIGGKLKSVSENGFIWEKGPNTMTENDPSISRMFDDLHLRDKQQFPVEQKKRYIVRNASPTMLPSNPLGFITTGLFSAQAKLKLLTEPFSWKRTKAESNEDESVGAFMERHFGDEIVDYAVDPFVAGTSGSDPSSISIRHSFPELWSLEKNYGSLFVGAIKSGFSKKKKQKLRPVEFEDEDSDFPARTRPRRGGSFSFVGGMQTLANELVSRIGKEKFKLNTFVTGLACNQQGNPSRQSWTVTGLETSGKRSKRSDKTFDAVIMTAPVDDVRAMKVVKDGKPYALDYLPTVIYEPMSVLITMFNKDSVKRALPGFGVLVPSKEQQANGFQTLGTLFSSFMFPDRAPEDQLLFTTFIGGSRNTLLASRSKEELLDITLKDLSRLIGVEGQPTAIRHVYWEKAFPRYSIGYDNVLHSIQKLESDLPGLFYAGNHRGGLAVGKTIVSGLDAAEQVLQYLQGSGGKKVFTMASLEQPVS

SEQ ID NO: 17 - protein, 508 aa, Arabidopsis
MASGAVADHQIEAVSGKRVAVVGAGVSGLAAAYKLKSRGLNVTVFEADGRVGGKLRSVMQNGLIWDEGANTMTEAEPEVGSLLDDLGLREKQQFPISQKKRYIVRNGVPVMLPTNPIELVTSSVLSTQSKFQILLEPFLWKKKSSKVSDASAEESVSEFFQRHFGQEVVDYLIDPFVGGTSAADPDSLSMKHSFPDLWNVEKSFGSIIVGAIRTKFAAKGGKSRDTKSSPGTKKGSRGSFSFKGGMQILPDTLCKSLSHDEINLDSKVLSLSYNSGSRQENWSLSCVSHNETQRQNPHYDAVIMTAPLCNVKEMKVMKGGQPFQLNFLPEINYMPLSVLITTFTKEKVKRPLEGFGVLIPSKEQKHGFKTLGTLFSSMMFPDRSPSDVHLYTTFIGGSRNQELAKASTDELKQVVTSDLQRLLGVEGEPVSVNHYYWRKAFPLYDSSYDSVMEAIDKMENDLPGFFYAGNHRGGLSVGKSIASGCKAADLVISYLESCSNDKKPNDSL

SEQ ID NO: 18 - protein, 454 aa, Acidithiobacillus
MSSETVIVVGAGLTGLSATWYLHQRGIPALLLEAEAEVGGNLRSRSEDGFLRDLGPNSLMIKGDLLPDLIRQLQLEDRVVEANPLARRRFVLNRRGHPVALGPDVLFSSSLLSLSARLRLLSEPWRPRRPQSQNDESIADFVRRRLGPEALTWMVDPFVSGVFAGDPEKLSVTAALPRLAAMEAESGSLLRAALRRRRAGKKEGSSRLVSFRGGLQELPRALAARLPPDRLALSRPLTHLQRRGELWHLQTPAGDLECRRLVLALPAAESARLLRAEAPELAAELEAIVYPAVATVALGFPREAVDHRLDGFGLLIPRRLGIETLGVLFSSTLFPERAPPGMVLLTAFLGGAQQDISGRSPAELEAQALADLRPILGIRGDPAYHRCALWPRAIPQYALGHRQRVERIHELRRQLAGLELLGNWQGGVALGDCVVQADAFQRTFAQVDTATGPS

SEQ ID NO: 19 - protein, 512 aa, Arabidopsis
MESGAVGDHDTKFESISGKRVAVVGAGVSGLAAAYKLKSRGLNVTVFEADERAGGKLTSVMQNGLIWDQGANTMTEAEPEVGSLLDDLGLRDKQQFPISQKKRYIVRNGLPMMLPTNPIELVTSSVLSTQAKIQILLEPFLWKKNDSSSKVSDASAEESVSGFFQRHFGQEVVDYLIDPFVGGTSAADPDSLSMKHSFPDLWNVEKSFGSIIVGAIRTKLAAKGGKSGEAKSSPGTKRGSRRSFSFKGGMQILPDMLCKSLSHDEINLDSKVLSLSYNSGSRQENWSLSCVSHNETQRQNLHYDAVVMTAPLCNVKEMKVTKGGQPFLLNFLPEINYMPLSVLITTFTKEKVKRPLEGFGVLIPSKEKKHGFKTLGTLFSSMMFPDRCPSDLHLYTTFIGGSRNQELAKASTDELKQVVTSDLQRLLGVEGEPVSVNHYYWRKAFPLYDSSYGSVMEAIDKMEKDLPGFFYAGNHRGGLSIGKSIASGCKAADLVISYLESCSNDKKPDESL

SEQ ID NO: 20 - protein, 502 aa, Glycine
MASSATDDNPRSVKRVAVVGAGVSGLAAAYKLKSHGLDVTVFEAEGRAGGRLRSVSQDGLIWDEGANTMTESEIEVKGLIDALGLQEKQQFPISQHKRYIVKNGAPLLVPTNPAALLKSKLLSAQSKIHLIFEPFMWKRSDPSNVCDENSVESVGRFFERHFGKEVVDYLIDPFVGGTSAADPESLSMRHSFPELWNLEKRFGSIIAGALQSKLFAKREKTGENRTALRKNKHKRGSFSFQGGMQTLTDTLCKELGKDDLKLNEKVLTLAYGHDGSSSSQNWSITSASNQSTQDVDAVIMTAPLYNVKDIKITKRGTPFPLNFLPEVSYVPISVMITTFKKENVKRPLEGFGVLVPSKEQKNGLKTLGTLFSSMMFPDRAPSDLYLYTTFIGGTQNRELAQASTDELRKIVTSDLRKLLGAEGEPTFVNHFYWSKGFPLYGRNYGSVLQAIDKIEKDLPGFFFAGNYKGGLSVGKAIASGCKAADLVISYLNSASDNTVPDK

SEQ ID NO: 21 - protein, 474 aa, Chloroflexus
MMAGYDSVVIGGGIAGLAAAYTLHKRGYRVLVIESTNRVGGVIQTITTPEGYILDCGPNTVGTGDARLWQELIDLGLRERITPAAPCSKRRFILINGTPVEIPTSPVGLITTRLLSWRGKLRVLAEPFINRGSTDPDESVAAFFTRRIGAEATAHLLDPFVAGVYAGDPQRLSTAAVFPSLWEAAQRSGSIVRGMLSKPKPKTQVSEPKMRSRTFTFRGGLAEWPRALAQALGAGNVWTERRVVKLQPRDSWWEVTIDGVNGPETLISRSLIIATPAFTAADLIESVDQRAAGALRGIPYAPVAVVHLGFRRDQISQELSGFGVLAPSSEQRQFLGILWTSSIFPHVAPHDHVLTTTLSGGAIRPELAERSDETLIEAAIRDHHQLLGIRGQPIFTHVTRWRTAIAQYTFGHRERIATLVQLEQRLPTIQFAGSYRDGVGVPKTWASGVQAGERIAAALAAHGTTAVSTETASG

SEQ ID NO: 22 - protein, 499 aa, Medicago
MASSAKDDNPRSVKRVAVVGAGVSGLAAAYKLKSHGLDVTVFEAEGRAGGRLRTVSRDGLVWDEGANTMTENEIEVKGLIDALGLHEKQQYPLSQHKRYIVKNGTPVLVPANPAALLKSKLLSAQSKIQVIFEPFMWKRSDSSAVRDENSEESVSRFFERHFGKEVVDYLIDPFVGGTSAAGPESLSIRHSFPELWNLEKRFGSIIAGALQSSVFGKKDKAGETKDVPRKNKHQRGSFSFQGGMQTLTDTLCKELGKDDIKLNAKVLTLAYSHDGSSPSQNWSITCTSNRKAQDVDAVIMTAPLGNVRDIQIKKKGNPFPLNFLPEVTYLPLSVLITTFKKENVKRPLEGFGVLVPSKEQQNGFKTLGTLFSSMMFPDRAPSDMHLYTTFIGGTRNRELAQASTDELTKIVTSDLRKLLGAEGEPAFVNHFFWSKGFPLYGHNYGSVLEAIDKMEKDLPGFFYAGNHRGGLSVGRAIASGCKAADLVISYLNNASDNSV

SEQ ID NO: 23 - protein, 475 aa, Chloroflexus
MMMANYDSVVIGGGIGGLAAAYTLYKRGYRVLVIEAANRVGGVIHSITTPEGFTLDCGPNTIGTNDVRLWQELIDLGLRDRIRPAARCGRRRYILINGTPIEIPSSPVGLITTRLLSWRGKLRVLGEPFVNIGTPTGEESVAAFFSRRIGHEAVAHLLDPFVAGVYAGDPNQLSAAAVFPSLWEAVQRGGSIVRGMLRRPKQKTLISEPKMRSRTFSFQGGLADWPRAIARALGTGNVWTGRRAVGLRDLGTYWEVTVDGTGRLETITTRSVIIATPAYVAAELVEALDPAAASALRSIPYAPVSVVHLGFRRDQLSHELNGFGVLAPSSERRQFLGILWASSLFPHVAPPDRVLTITLSGGAIRPEVAEQSEEALIESAIRDNQEVLGIRGQPLLTHVTRWHHAIAQYTLGHRERIATLERLEQRRPTLQLTGSYRGGIGIPKTWASGVGAGERIAAALDAQGTTADTLEQARG

SEQ ID NO: 24 - protein, 508 aa, Vitis
MAEKSDAQSHYNGSGKRVAVVGAGVSGLAAAYKLKLHGVNITLYEAEERAGGKLRSVSQHGLVWDEGANTMTESEIEVGSLLDNLRLREKQQFPISQNKRYIVRNGMPVLLPSNPIALIKSNILSAKSKFQIILEPFLWKKSDLSKVSDDHMKESVGGFFQRHFGKEVVDYLIDPFVAGTSGGDPESLSMHHTFPELWNLEKRFGSIIAGAVLSKLSAKREKRGETKGSSEKKKRQRGSFSFQGGMQTLTDTLCKELGKDKLRLKSKVLSLSYSHGEKSALENWSVAYASNPGKQSKDLSFDAVIMTAPLCNVREMKIMKKGNPFLLDFLPEVSYLPLSVIITTFKKENVKRPLEGFGVLVPSKEQQNGLKTLGTLFSSMMFPDRAPNDLYLYTTFIGGSRNRELAKASTDELKQIVTSDLRQLLGAEGEPTFVNHFYWSKAFPLFGHNYDSVLEAIDKMEKDLPGFFYAGNHKGGLSVGKAIASGCKAADLVISYLNSSSDGKMFKE

SEQ ID NO: 25 - protein, 544 aa, Zea
MLALTASASSASSHPYRHASAHTRRPRLRAVLAMAGSDDPRAAPARSVAVVGAGVSGLAAAYRLRQSGVNVTVFEAADRAGGKIRTNSEGGFVWDEGANTMTEGEWEASRLIDDLGLQDKQQYPNSQHKRYIVKDGAPALIPSDPISLMKSSVLSTKSKIALFFEPFLYKKANTRNSGKVSEEHLSESVGSFCERHFGREVVDYFVDPFVAGTSAGDPESLSIRHAFPALWNLERKYGSVIVGAILSKLAAKGDPVKTRHDSSGKRRNRRVSFSFHGGMQSLINALHNEVGDDNVKLGTEVLSLACTFDGVPALGRWSISVDSKDSGDKDLASNQTFDAVIMTAPLSNVRRMKFTKGGAPVVLDFLPKMDYLPLSLMVTAFKKDDVKKPLEGFGVLIPYKEQQKHGLKTLGTLFSSMMFPDRAPDDQYLYTTFVGGSHNRDLAGAPTSILKQLVTSDLKKLLGVEGQPTFVKHVYWGNAFPLYGHDYSSVLEAIEKMEKNLPGFFYAGNSKDGLAVGSVIASGSKAADLAISYLESHTKHNNSH

SEQ ID NO: 26 - protein, 478 aa, Arabidopsis
MASGAVADHQIEAVSGKRVAVVGAGVSGLAAAYKLKSRGLNVTVFEADGRVGGKLRSVMQNGLIWDEGANTMTEAEPEVGSLLDDLGLREKQQFPISQKKRYIVRNGVPVMKKSSKVSDASAEESVSEFFQRHFGQEVVDYLIDPFVGGTSAADPDSLSMKHSFPDLWNVEKSFGSIIVGAIRTKFAAKGGKSRDTKSSPGTKKGSRGSFSFKGGMQILPDTLCKSLSHDEINLDSKVLSLSYNSGSRQENWSLSCVSHNETQRQNPHYDAVIMTAPLCNVKEMKVMKGGQPFQLNFLPEINYMPLSVLITTFTKEKVKRPLEGFGVLIPSKEQKHGFKTLGTLFSSMMFPDRSPSDVHLYTTFIGGSRNQELAKASTDELKQVVTSDLQRLLGVEGEPVSVNHYYWRKAFPLYDSSYDSVMEAIDKMENDLPGFFYAGNHRGGLSVGKSIASGCKAADLVISYLESCSNDKKPNDSL

SEQ ID NO: 27 - protein, 441 aa, Hydrogenobacter
MIDVAVVGAGISGLSIAYHLKKAGLEVKVFEKEDAVGGNIQTAYIDGYVCELGPQTILADSKVEEFLKDAGIKPIYANPSSKKRYIYRKGKLVALPLSPVEFLLSPFLSLGGKLRVLKEPFVPRSPKQEESIAEFVRRRFGREFLDYVVAPFVSGVYAGDPEELSVKYAVRKVYELEQKYGSVIKGAIKLKALGPSGKLISFEGGNATLIRKLSESLEVHKENVVLRIRRKDDIFILDTKEGKVTAKAVVVSTPATSTGYLLRDLSWSISEEFDKIYYAPVLVVHVAVKFGVLPEGFGFLVPKKENKRILGVIFSSNLFEGRSPEGKSLITVYIGGATDPEIIEYEDEAIVSVLERELRETVDIRDWDLLKITRWKKGIPQYTVGYGRYLELANSIEMEQPGLFLSGNYLYGVSVADCIRVSHHIAKRVIDFLEVKGRTVV

SEQ ID NO: 28 - protein, 458 aa, Thermovibrio
MRVCVIGGGVSGLSTAFYLKRGGAQVKLLERENYPGGKARTYYEKGYIVESGPNGFLDGKPDTLELVKLLGAEKLLYRSSDKARKRFIYKNGRLVRLPENPIAFLSSYLLSWKGKVRVLGELLVPPSEKEDETLAEFVRRRLGKEALDYLLDPMVAGIFAGDPERMSLKAAFPTIYRLEREYGGLIRGLIAKAKEAKKKGAKSSGPAGPGGVLTSFVKGMSQFTQLLAQELGESFTPEAQVKTLEKKKDKWLVTYTLRGKEKSEEFDAVVLSLPAYAAAQVLKETSRELSELLASIEYSPISVVALGFEKRGLGHNLDGFGFLVPKVEGRKILGALWDSSVFPNRAPEGKALIRVMIGGARQPELALKSEEELTEIALKELKRIMKIRHYPEMVKVFRHEKGIPHYTIGHAEKVERIFKLGRELGNLFFCNNAYKGVGINDCTKSARETAEEVLNSLC

SEQ ID NO: 29 - protein, 462 aa, Ignavibacterium
MTKTIVVIGAGISGLTTAYLLSKRGFNIRILERKSEVGGSIESIKENGFLFDRGPNSALETTPLISQLVEELNLKDELLYANKAANKRYILRNNELHALPMSPPALIKTKLFSAKAKLRLLTEPFIGRSEDGYYQSLAEFVRRRLGQEFLDYAINPFVAGVYAGKPEELSVKSAFPKLYALEEKFGGLIIGTIRSIRERKKRAEKSKQSARMLSFKSGMISLPKAIANYFADKLILSAEVISVDKTAEGFIVSYRHSGIDEAIVCDAVLSTVPSYVAGNLFSKFDKKFKVHSDEIYYPPVLVYFLAYEKKNIGQTLDGFGFLIPEKENKSFLGALWSSVIFPYRADNNFATFTLFIGGSRYPDFVKEDRNKLLEKVRKEFEQLMKIKSDPVFSAYRFWEKAIPQYNIGYIEHERFFDEFEKQNPGLFISGNFRGGISVGDCIKNAELVANKICVQFTMHNVQ

SEQ ID NO: 30 - protein, 544 aa, Sorghum
MLARTATVSSTSSHSHPYRPTSARSLRLRPVLAMAGSDDSRAAPARSVAVVGAGVSGLVAAYRLRKSGVNVTVFEAADRAGGKIRTNSEGGFLWDEGANTMTEGELEASRLIDDLGLQDKQQYPNSQHKRYIVKDGAPALIPSDPISLMKSSVLSTKSKIALFFEPFLYKKANTRNPGKVSDEHLSESVGSFFERHFGREVVDYLIDPFVAGTSAGDPESLSICHAFPALWNLERKYGSVVVGAILSKLTAKGDPVKTRRDSSAKRRNRRVSFSFHGGMQSLINALHNEVGDDNVKLGTEVLSLACTLDGAPAPGGWSISDDSKDASGKDLAKNQTFDAVIMTAPLSNVQRMKFTKGGAPFVLDFLPKVDYLPLSLMVTAFKKEDVKKPLEGFGVLIPYKEQQKHGLKTLGTLFSSMMFPDRAPDDQYLYTTFVGGSHNRDLAGAPTSILKQLVTSDLKKLLGVQGQPTFVKHIYWGNAFPLYGHDYNSVLEAIEKMEKNLPGFFYAGNNKDGLAVGSVIASGSKAADLAISYLESHTKHNNLH

SEQ ID NO: 31 - protein, 456 aa, Desulfurobacterium
MKVAVIGAGISGLSVAFYLKKGGAEVKVFEKEKTVGGKMKTIHEDGYIIETGPNGFLDGKPYTLNLVKELGIESKLYRSSDKARKRFIYTNGRLVRLPESPIAFLASYLLSWKGKLRLVGEFLVPPKKEDIDESLSEFAKRRIGEEALEKLLDPMVAGIFAGDPDRLSLKAAFPAIYYLEKQYGGLIKGLIAKMKEAKKSGKKSGPAGPGGVLTSFKGGVKDLIDSLSEFLGDSIETEVEILGLDRIEKGWKVKYKKENEVFEETFDAIVFSTPAYITAKLLNDLNLELSKLLSEIEYSPISVVALGFEKKGLGHDLDGFGFLVPRSEKRKILGALWDSSVFPNRAPSGKALIRVMIGGARQPELALLPDEELVNIALKELRRIMKIRHYPEKIKVFKHEKGIPHYTVGHAERVEKIFRLISKYPGLYLCNNAYTGVGVNDCTKAAEEVARRILDG

SEQ ID NO: 32 - protein, 446 aa, Acidithiobacillus
MEDVIIIGAGISGLATAYFLRKQGWSPLLLEAAAKPGGNLQSRQEEGYLRDMGPNSLMLKGHIVPEWLRELRLEEDIVEANPLAKRRYILNRHRQPVALGPGVLFGGGLLSWRGRLRLLGEPFRSPRRMQDSEESVADFVRRRLGEEALTWLVDPFISGVFAGNPARLSVQATLPRLIALEQDGGSLLRGALRARNKKSPDTPKTRLISFREGLQTLPLRVASALGDALRCNTPVEQLGNSDGSWQVSSGSQTWQSKRLILALPAGAAARLLAPTDAALAHELDAIPYPAVGSLSIGFQRMQVQHPLDGFGILIPRVMGLETLGILFSSTLFPGRAPADQVLLTAFIGGSQNDISGRDDDDLLATALREICPLLGISGKPVFSRCQTWPKAIPQYEIGHLDRIKRIDALSARHPGLYFRANWREGVALGDCMEEAYRFSQDVGWQR

SEQ ID NO: 33 - protein, 433 aa, Thermocrinis
MMDVIVVGAGISGLSVAFRLSKEGLKVKVLEKEEEPGGNIRTRKVGDFLCELGPQTVLADGEVVDFFREVGIQPQEASPSSSVRYIYKRGKLIPLPNSPVKFLTSPLLSLGGKLRVLMEPFVAPSVKTEETVAQFVRRRLGEEFLHYVITPFVRGVYAGDPEELSIKYAFRRVYQLEREYGSLIRAAIKLKRLGPPGKIISFEGGNQSIIQQLASYVDLETENVALRIRRKDDRYILDTKEGKYEARCVVVASPATSAGYLLRDISWSAAQELDKIYYAPVVVVHVATSQNIPDGFGFLAPQKEDLRILGVLFSSRIFPNKAPQGKELLTIYMGGATDPEVVEYEDELIMRIVEEDLRKSLGLTQLEFLLVTRWKRAIPQYTLGYGRYIELVEALQRENPGLFITGNYLEGVSVADCIKRSKRVVQEVVKFFR

SEQ ID NO: 34 - protein, 440 aa, Laribacter
MVVVIGAGISGLSCAWHLQQRGIPVVVLEAGSRVGGKIGTVAADGYRLELGPNTLYGHAGHLDLLERLGLTAAIRPAAAVVRHRFVLRGDRYEALPSGPLSFLTGSQFGARSKWLALTEPFRRNRPVREPETVAAFFRRRLGDEFVERAISPFVGGIFAGDPEELVAGLTLPVIHEAERQSGSIVRGMFARRKTFRRKATFTLNEGLQQLPETLAQGLDVRLDTSVQALERLETGWRVRTPAGELDADEVVLAVPADVAGQLLASHFPAIAANLANVTYAPVAVLHTAWPRSTVGHDLDGFGGLNPKVEKPFAAGSIWSGSLFPDRTPAGETLLTTFVGGMQFLDRYRHDDATLVALALEELRRLYRIQGEPTLCRLTRQEQAIPQYDSHALPLASAVSDLHEHGIRVCANWHGGVSVVDCLDKGQQVAVQCLLDYPPAS

SEQ ID NO: 35 - protein, 446 aa, Acidithiobacillus
MEEVIIIGGGISGLATAYFLRKRGWSPLLLEAGAAPGGNLQSRQEEGYLRDMGPNSLMLKGRIVPEWLRELQLEGDIVEANPLAGRRYVLNRHRQPVALGPGVLFGGGLLSIRGRLRLLGEPFQPPHPTPDGEESIADFVRRRLGDEALTWLVDPFVSGVFAGNPARLSVQATLPRLAALEQDGGSLLRGALRARKKKLPGTPKTRLVSFREGLQVLPLRVANTLGDTLRCDTPVDQLAYSGDMWQVGSGNQTWQSKRLVLALPAGAAARLLAQTDATLARELDAIPYPAVGSLSIGFRRPQVEHPLDGFGMLIPRVMGLETLGVLFSSTLFPGRAPAGQVLLTAFIGGSQNVLAGRDDDDLLATVLREIGPLLGISGDPVFSRCRVWPKAIPQYEIGHLDRMKRIDTLSAGHPGLHFRANWQGGVALGDCIEQAWEFSQTADWQH

SEQ ID NO: 36 - protein, 453 aa, Deferribacterde
MKIAIIGGGISGISTAFWLEYFAKERLKSIDITIFEKNKRLGGTINTFYKDNFIIESGPNGFLDSKPYTVETFEKAGLGDNLIRSNELAKKRYIMRGGVLHKLPEKPNEFFSSKLLSFKGKLRVISELFIPAKKDEYDETIEEFAYRRLGKEAADYLISPMVSGVFAGDPSKLSLKSCFPVIYNLEKEYGGLFKAMFKKKGKKSGPAGPGGNLTSYKGGLIKGINALTEQLSNTKIYLGEEVTGLDKTNGSFKVKTTNSCDNYDIVIITSPAYVAAEFIKGLSVELSDKLLKLNYAPMYVIGFGFKEEDVLDPLDGFGFLVPHNENRKILGALFTSSIFPERAPKGYKLIRVMIGGDKNRWVLNCSEDELRDIAFNEIKDILGVKGNSVVEKSFYWERAIPQYYQGHEKLVEDIESICMDINNIYIGGNLLYGIGINDCTKRSIDIARGVLGG

SEQ ID NO: 37 - protein, 471 aa, Geobacter
MKKAIVVGGGISGLASAYLLREKAKNSGMELEITIVEKEDRTGGKIRSIKEDGYLCEWGPNGFLDSKPQTLDLCRELKVDSQLLRSNDNARKRFIYSGGVLNRLPENGPSFLKSRLISWPGKLRLALEPTPFIAKAPEGVDETLAAFGRRRLGDEALRKLIAPMVSGIFAGDPETMSLVSCFPRIAELEREYGGLVKAMVKLAKKKKQEIAEGKQVASAAGPGGVLTSFRDGIQTLTDILNERLGKDMLVIGAEVTGVSRGNSTPYRVQTGGRELDADIVVLATPAYATAQALEGIDGGMSATLNQIPYATMTVVCFGYEQEKVAHDLNGFGYLIPKAEGMNILGTLWDSSIFENRAPEGKVLLRSMMGGACFPEYIRLSDAEVVQKVRDNLKTIMGIKEAPEFVRIFRHEKAIPQYTVGHGRRLAALEEQAKSHPGLFLSGNSYRGIGLNDCVAAANRTADEVVAFLQSR

SEQ ID NO: 38 - protein, 450 aa, Thermodesulfovibrio
MGSAEIVIVGGGISGLSLAYFLIQKNSQLNIKIVEAEKRAGGKIITENISGFLCEGGVNGFLSNKPSTISLAKELNIEPLRGSESSKIRYILIDGKLIRVPENPIKFFLTPLLSFSGKIRMLREYFTPPLKEEIDETVESFVSRRVGKEFYEKLIDAMSTGIYAGDPSKMSMKSCFPKVYWLEKRHGGLLKGLIALKKEKKDTKAQPSGVLMSFKGGMSELIQSLERHLSSRILKGKKVLSIDRKNTYYTVHLDDGNFIEAEKVILACPAHESAEILKELSSELSDILKTIPYPPLSVVAFGFKKEQIGFGTSLYGFLIPYREQRKILGTLFDSSIFPNRAPESYVLLRSMIGGRRAPELAMLPDEKLIDTALSELKPLLNIKGDPEFIKIFRWEKAIPQYELGHEDKLNRIEQILSEFSGLYLTGNAYRGVSVNDCIENSLKLAEGIMV

SEQ ID NO: 39 - protein, 469 aa, Geobacter
MKKAIVAGGGISGLATAYLLKTRAAEEGLELDVTLVEREERLGGKIWSIKEEGYLCEWGPNGFLDSKPQTLDLCRELGASDLLLRSNDNARKRFIYTGGALNRLPENGPMFLKSGLISWPGKLRLAMEPFIPKKAGDEDETLAAFGRRRLGDEALRKLIAPMVSGIFAGNPETMSLRSCFPRIAELEDEYGSLVRAMIRLAKKKKQEVAQGKAVASAAGPGGVLTSFRDGIQALTDILAERLGPDTIVSGQEVLEVSRGGSLPWRVRTGSIDMDADLVILATPAYATASIIQGVDSDMAGILRQIPYATMTVVCFGYDRERIAHDLNGFGYLIPKEEGMNTLGTLWDSSIFENRAPEGQVLLRSMMGGACFPEYVNLTDEEVTGRVKNDLATIMGITAPPSFVRIFRHHQAIPQYTVGHSTRVAALEQRAASLPGLFLTGNSYRGIGLNDCVAAANRTAGEAIAQLTSR

SEQ ID NO: 40 - protein, 469 aa, Geobacter
MKKAIVAGGGISGLATAYLLKTRAAEEGLELDVTLVEREERLGGKIWSIKEEGYLCEWGPNGFLDSKPQTLDLCRELGASDLLLRSNDNARKRFIYTGGALNRLPENGPMFLKSGLISWPGKLRLAMEPFIPKKAGDEDETLAAFGRRRLGDEALRKLIAPMVSGIFAGNPETMSLRSCFPRIAELEDEYGSLVRAMIRLAKKKKQEVAQGKAVASAAGPGGVLTSFRDGIQALTDILAERLGPDTIVSGQEVLEVSRGGSLPWRVRTGSIDMDADLVILATPAYATASIIQGVDSDMAGILRQIPYATMTVVCFGYDRERIAHDLNGFGYLIPKEEGMNTLGTLWDSSIFENRAPEGQVLLRSMMGGACFPEYVNLTDEEVTGRVKNDLATIMGITAPPSFVRIFRHHQAIPQYTVGHSTRVAALEQRAASLPGLFLTGNSYRGIGLNDCVAAANRTAGEAIAQVTSR

SEQ ID NO: 41 - protein, 436 aa, Aquifex
MDMREVVVIGAGISGLSTAYRLKKEGVDVVVYEKDDRIGGTIHTVKEKGYLFEVGAQTILADQEVIDFLKEAGIEPVEASPSSKYRYIYKKGRLIPLPMSPVEFLKTPLLSLKTKLKVLTEIFKRGVDEDISIADFVREHFGEEFLNYVVAPFISGVYAGDPEKLSLKHATPKLYEAQKKYGSLIKAFIKEKTAGPKGKLISFGEGLGELINALAQKLEVHTENVVLRMRKFEDFFRLDVRGKKVETKSVVVASPAYTSSYLLKEVSFSASEEFDKIDYPPVVVVNVGVEGKFPKVRLLSSESGKKRILGAMFMSKLFPGRAPQGKELLTVFLGGATDREVIELSEEEIENIVERELKEILQIDCIDFMHVQKWKRAIPQYTLGYDRFLNLAQEMEKDYPGLFLTGNWLYGVSTADCIRASKKVAQKVLSFLRPQA

SEQ ID NO: 42 - protein, 470 aa, Pelobacter
MNISVVGAGISGLATAFAIQQQARRLGLEWTLDIFEKEDCSGGKIRSEKVDGYLCEWGPNGFLDSKPMTLDLCREAGLAEQLLRSNDAARKRFIFSGGRLQRVPESAADFFRSSLVSWPGKLRLAAELLVPRRKDLTDETLADFVRRRLGREALDQMVGPMAAGIFAGDPETMSLRSCFPRIHELEQQYGGLIRALLLLARKKRAERRAGKAVAGAAGPGGILTSFGGGIQELTDGLSRLLAPNLHLGDAVAAITPLKEGFSLRTHKGRVHETDIVVAAVPAMALATQVEGFSAPMAAQLRQIPYAPLQIACFGYRREALPLSLDGFGYLAARRSGMHSLGTLWSSSIFPGRAPAGYVLLRTMFGGATRPDAAQLSADEVQQRVEEDLSRSMGIKQAPDFVRIIRHTAAIPQYVSGHGARLKVLEDKAAAYPGLFLVGNAFYGVGLNDCVAAADRVASRVLTLMQQRQQA

SEQ ID NO: 43 - protein, 469 aa, Geobacter
MKKVIVVGGGISGLATAFELRNKGAEAGIELDVTLLEKEERVGGKIWSIKEEGYLCEWGPNGFLDSKPQTLDLCRDLGASERLLRSNDNARKRFIYTGGVLNRLPENGPTFLKSSLISWPGKLRLAMEPFISKRTDGTDETLASFGRRRLGEEALQKLISPMVSGIFAGDPETMSLRSCFPRIAELEDEYGSLIKAMIKLAKKKKQEAAQGKAVSSAAGPGGVLTSFRWGIQELTDILAEQLGSATVVTGQPVTGLTRGSSVPWRLKTPTVDIDADVVILASPAHATAGIVSGVDAAMAQVLGEIPYASMTVVCFGFERERIAYDLNGFGYLIPKDEGMNTLGTLWDSSIFENRAPEGKVLLRSMLGGACFPEYVKLSDAEVMQRVKADLKATMGITADPSFIRIFRHPQAIPQYTVGHGKRLAALQERSSALPGLFLTGNSYRGIGLNDCATAANRTTDEVVAYLKGR

SEQ ID NO: 44 - protein, 435 aa, Cytophagahut
MIAIIGAGISGLTLAYQLQQAGKPYILFESNSRPGGYINSQRFGKYLLEVGPNSILVDKKLEEFIHELNLDKLFEPAAIINKNRFIYKDANIQQVPSGPLSFLTGRFFSAKTKYAIFKELFNKSISKENETVYDFFARRFSAPFTQYTIDPFATGVYAGDIKQLLIEETFPQLVELEKQYGSIIKGIFKKGFGEKRKTGTFVHGLQTLTDTLAAQLHSLQLNTRVLNLRKQMDKIVLTTDTKHGIEELTFDKVVVCGTTFQAATLIKDSYPDLSAILSQVQYASMKAVFAAFKRTDVTHPMNGFGCLYPSAEQSFLAGTIWNSSIFNDRCPADEVLTTSFIGGMHHPEYTALSESELEQRAIQQLSKDLGITGKPTFTHVAGWNKAIPQYDIYLKKARLASKLLSDDHIYFRSNWTNGISLGNCIQSARDLALIL

SEQ ID NO: 45 - protein, 471 aa, Geobacter
MKKAIIVGGGITGLATAWLLREKAKKAGMELEIALLEKEERVGGKIRSIKADGYLCEWGPNGFLDNKPQTLDLCRDLQADSQLLRSNDNARKRFIYSEGFLHQLPENGPSFFKSKLISWPGKLRLALEPTPFIAKAPDGVDETLAAFGRRRLGDEALRKLIAPMVSGIFAGDPETMSLQSCFPRIAELEREYGGLVMAMVKLAKKKKQELAEGKAVASAAGPGGILTSFRDGLQTLTEIIRGQLGCEVLSVGEEVVRIRKGSSVPYRVETTSRELDADVVVLATPAYATGQMLEGLDSAMTGILGQIPYATMSVVCLGYEQDKISHDLNGFGYLIPKGEGMNILGTLWDSSIFENRAPQGRVLLRSMMGGACFPEYIKLSDEEVQRRVCDNLKTIMGIAAPPDFVRIFRHEKAIPQYTVGHGKRLQALLDAGRNHQGLLLTGNSYRGIGLNDCVAAAVRSSNEVMEHLQKR

SEQ ID NO: 46 - protein, 465 aa, Porphyromona
MDHLTVIIGAGLTGLTTAAFLRAAGRPVLVLERAAHIGGQIRTYREDGFVFETGPNTGTISSPEVAELFELLGLEPEIATPAASNRLIWKGNKLYPLPRNIAEAVATPLFSLWDKWRILGEPFRRRGGQPNETVGALARRRLGKSFVDYAVDPFLGGIYAGDPDQLVTRFALPKLYDLEQRYGSFVLGAVRKARQPQSERDRKASRKVFSVQGGLGLLVEALADYIGREHILTETQIRYINHPGAHTFGLTYTDASEEEHTIPCRHLVSTVAAHHIPTLFDHFPADESAVFEQLYYAPMIEVAVGFRRNVATHLPAFGCLIPSRENRRILGILFPSDCFRGRAPEGGALYSIFMGGVRNASLIDLSDEEISTIAMEELRDMLRIPHTCKPDLLHISRHRHAIPQYYADTELRQDIIRRMEMRWPGLHLGGNMHGGIGMAHRISQGVEMARSIIEETAIAERSARG

SEQ ID NO: 47 - protein, 464 aa, Corallococcus
MTVAVIGGGITGLALAYQLRARGTDAVVLESTSRVGGNVQTHARGGYLLEAGPNSFLDREPTTRELADALGVSSRIRPADVAAKNRYVFTRGALRALPTSPPAFLKSDILPLASRLRVVGELFSGRNPTGADESLAQLGRRHLGREATAVLLDAMQTGTYAGDPEQLSAEATFPQLVKFEREHRSLILGAIRAQRAARQAKGAVETGPRLTGQMSTFDGGLGVLVDALAKALGDSVRTDAKVEGLERAADGWTVRYQQRGQPAELSASHVVLAVPAHVAASLVRPLDAELAQKADAIPYAPIAVVHLGFAPGTVPKPDGFGFLVPAVEGTAMLGTIHVSTTFPFRVEGGRVLLTCLMGGARRPEVVSRDEDALVALAREELKAMAGLTATPELTAVFRWPRGIPQYTVGHLERLAAMEERLKRWPGLHLAGNAYRGVGVNDCLKEAARLAEALGGPAAGATRSA

SEQ ID NO: 48 - protein, 454 aa, Calditerrivibrio
MRVAIIGGGISGISTAFLLENLKNELNLDMEITIIEKRLRWGGSIETSREDGFIVEAGPNGFLDSKPHTLELLSMAGLSNNLVKSNDLARKRYIMRNGILHRLPENPPMFFKTKLLSFSAKMRILSEYFIQKSVLEDESVADFARRRLGKEALEYLISPMVSGIFAGDPEKMSLRSCFPVIRDLEINYGGLFKGMIKKKGKKSGPSGPGGILTSYKNGLDNMITDLLESTSITKMLNTEVFSIDKKINRYILNTNKGIMEFDKIFINAPAYAVSQMLSVLDKDLSRDLNNITYPPVFVAGFIFKPEDLEDPLDGFGYLIPHSENKRILGALFDSSIFPDRTRDGYKIVRTIMGGDKNRWIIEKSDDELIRMAFDDIKETLKIKREPYKIKYFRWEKAIPQYYIGHHKIVEKVEEFYKKFDDIFIGGNILYGVGINDCTRTSFMNVDRFKNLLNK

SEQ ID NO: 49 - protein, 465 aa, Porphyromonas
MDHLTVIIGAGLTGLTTAAFLRAAGRPVLVLERAAHIGGQIRTYREDGFVFETGPNTGTISSPEVAELFELLGLEPEIATPAASNRLIWKGNKLYPLPRNIAEAVGTPLFSLWDKWRILGEPFRRRGGQPNETVGALARRRLGKSFVDYAVDPFLGGIYAGDPDQLVTRFALPKLYDLEQRYGSFVLGAVRKARQPQSERDRKASRKVFSVQGGLGLLVEALADYIGREHILTETQIRYINHPGAHTFGLTYTDASEEEHTIPCRHLVSTVAAHHIPTLFDHFPADESAVFEQLYYAPMIEVAVGFRRNVATHLPAFGCLIPSRENRRILGILFPSDCFRGRAPEGGALYSIFMGGVRNASLIDLSDEEISTIAMEELRDMLHIPHTCKPDLLHISRHRHAIPQYYADTELRQDIIRRMEMRWPGLHLGGNMHGGIGMAHRISQGVEMARSIIEETAIAERSARG

SEQ ID NO: 50 - protein, 454 aa, Stigmatella
MAVIAVVGGGITGLALAHRLRSRGKDAVVLEAGAHLGGVIQTRQRDGFSTETGPNSFLDREPATRELAASLGIEERIRMADPSAKSRSLYTRGQLRPVPASPPAFLKSDLLPLGTRLRVLAELFTGRAPPGQDESLGDFGRRHVGARATSVLLDAMQTGTYAGDVEALSAEAAFPTLKQLEREHRSLLLGAVRTQGRQRAPAPAGTKLKGAMCTFEGGLGTLVEALARALGPAARTGAAVEGLARSQNGWRLSVRERGQQAELEASQVVLTSPAHVSAELLAPLDPSLAGHLKGIPYAPIAVVHLGFAPGKTPPPDGFGFLVPGQEQRQLLGVIHVSTVFPFRAEGGRVLYTCLMGGARRPDLVGLNEEALAALAQQELREMAGVTASPDFTEAVRWPRGIPQYTVGHLERLSAIDSALARLPGLHLAGNAYKGVGLNDCIRNAAALAETLASR

SEQ ID NO: 51 - protein, 465 aa, Porphyromonas
MDHLTVIIGAGLTGLTTAAFLRAAGRPVLVLERAAHIGGQIRTYRENGFVFETGPNTGTISSPEVAELFELLGLEPEIATPAASNRLIWKGNKLYPLPRNIAEAVATPLFSLWDKWRILGEPFRRRGGQPNETVGALARRRLGKSFVDYAVDPFLGGIYAGDADQLVTRFALPKLYDLEQRYGSFVLGAVRKARQPQNERDRKASRKVFSVQGGLGLLVEALADYIGREHILTETQIRYINHPGAHTFGLTYTDASEEEHTIPCRHLVSTVAAHHIPTLFDRFPADESAVFEQLYYAPMIEVAVGFRRNVATHLPAFGCLIPSRENRRILGILFPSDCFRGRAPEGGALYSIFMGGVRNASLIDLSDEEISTIAMEELRDMLHIPHTCKPDLLHISRHRHAIPQYYADTELRQDIIRRMEMRWPGLHLGGNMHGGIGMAHRISQGVEMARSIIEETAIAERSARG

SEQ ID NO: 52 - protein, 462 aa, Leptospirillum
MSTVFRCDVLIVGGGISGLAAAMVLHQAGKNILLVESRGYLGGAIRSVEDSGYLLEMGPNSMMLGPEDPINVWLDKLGLSEKLLKASPEAQNRYVWCQGKLIPVPLSPSSFLTTPLFSLSEKMRVAKEFFISPGSGLPEGSDETVGHFVRRRLGNEFLEKLIDPFVKGVYASHPDLLSLNSAFPLLARLEQESGGLIRGAIRLSREKKRKKANLTGPPGGLYSFSGGLGEMVRAFSGYLKDESLIHGELIHWNRLPSGEFQCVLLQDEERVEVISQKMILATSPADAGRILEKNQPEIASVLSSIPMAPIAIAYIGVDRKALPGYLPGFGVLFPTSEKRKILGIIQNSDLFPNRSPDGKVLLTIFAGGMLSPKIAMSFDEDFEQIVLGELKTVFGLDSRPEFFRIQRWAEGISQYSPGHASRIQRIRDLTPEGMILTGNYLGGISVLKTFTNGLEAGKAFLS

SEQ ID NO: 53 - protein, 454 aa, Spirosoma
MTIGIIGAGISGLTLAYELQRRGIAYHLWEAAGQAGGYIRSQRDWPDGPSGRNYLRELGPNSLLGDAELLNWLDELGLTPELTFSQPVSKARFIFRDGKYRQLPSGPPSLLFGNFFSWKTKLAILRERNNKTVSPPGETLGQFFRRRFSSEIVDYALGPFVAGIYAGDPEQLLVSETFPSLLQYEKEYGSVLRGLIKSQSAGGSAIGRRQSFSFREGMQMLPNALAAKLTNLSLNEAVSSISPTPNGWEVETNTGTTTVDKLVLAVGTDAAARLVDQRYPDLARTLQAITYPPMTAVHSAYKRADVRHPLNGFGGLNPAVEGRFAAGHIWSSSIFTGRCPDDEVLFTTFVGGQTGAHNTRHPDSVLAHNVHKELVDGFGITAATPVYQSVFRWERAIPQYDATLASAKESVKAMEADQLFVCANWYGGVSLSDCIGKSRKLADQLAVKPFIKNF

SEQ ID NO: 54 - protein, 495 aa, Candidatus
MATEQHSGSRRIVVVGSGIAGLAAAYRLQERCEQDGPPCEVRVLEAAARPGGAISTTHRDGFVLESGPDTIFTDKPWGLDLIRRLGLSEQVIGTNEAHRRTFVVRDGALHPLPEGFALMGPTKPWPFLQSGLLSWRGKARAALDLVLPRGGPSDDESLASFVRRRFGQEFLDRLAQPMIGGIYGADPERLSLRATFPQFLQMEATHRSVILGLRRMRPAGRGVGHTSSGPRYGLFVTLDHGLQALVDAMVKRLPAGTLRLRAPVDRIAHTEQGWTVRLGDGASLQADGLILAVPAFEIARLTHDLDQDLARQLEAMPYASSVTINLAYRREAIHHPLDGFGFVVPACEGRTIIACSFSSVKFAHRAPAGHVLLRAFAGGALQPEPFTWDDETLLSAVRRDLEELLAIHAPPLWSQLVRHPRVMPQYQVGHLGRLAALEETLRRWPTLKLTGNAYRGVGVPDVVHSGETAADSLLAELAPSPTEPTPACTEGDSRL

SEQ ID NO: 55 - protein, 469 aa, Pelobacter
MKRAIIVGGGISGLATAWLLREKALACGIQLELVLLEKDQRPGGKIRSIHEGGYVCEWGPNGFLDSKPQTLELCDAVGVSSDLLRSNDNARKRFIYSDGELHRLPEGGGTFLKSRLISWPGKLRLALEPTPFIARTPAGVDESLADFARRRLGGEALDKLISPMVSGIFAGDPETMSLVSCFPRIAQLEREYGGLIRAMVRLARQKKRERAAGKAVSSAAGPGGVLTSFRPGIQYLTDSLAASLGGIVMADREVSWVRRGKSAAWRVGCRDGGEYDADLVIVASPAHAASAILHDCDAGIASILESIPYASMTVVCLGYERELVSHPLDGFGYLIPKKEGRSILGTLWDSSMFENRAPTGKVLLRSMVGGACFPDYVHMGDDELLGRVRGDMKDVMGIVAEPSFIRIFRHPQAIPQYTVGHGERLKHLEERLACHPGLILTGNSYRGIGLNDCVAAAQRASDQALELLR

SEQ ID NO: 56 - protein, 436 aa, Aquifex; identical to SEQ ID NO: 41

SEQ ID NO: 57 - protein, 495 aa, Candidatus; identical to SEQ ID NO: 54

SEQ ID NO: 58 - protein, 457 aa, Artificial Sequence
  Synthetic Polypeptide
MGVEVAIIGAGISGLSVAFFLKRAGAGVLVLEAEEDVGGTMRSRRFKGYLIELGPNSALETTPLFQELIAAAGLAGERVYASEAARNRYIVRGGELHPLPLTPLAFLRSRLWSWKGKLRVLAEPFHGRADREESVADFARRRVGQEFLDYAVNPFVAGIYAGDPERLSVRFAFPRLYALEAQYGGLFLGMLRGARERRRRGEAPKIAARLFSFREGMGALPRALAAALGNTVWCATRALCVERAGAAFEIAFERDGRRDTLRAERVVLATPAYAAASLLKRLAPEAARALDRIVYPPVSAVILGYPETAIGRPLDGFGFLVPEKEQRRILGTIWNSTIFPARAPQGFVTLTTFVGGMRQPELARRPNEELIALVAEELTDLLRLRGEPEFAYVSRWERAIPQYELGYGEILDALDRAEREHVGLYFCANYRGGIAVGDCVMSAHATAERILRDRARS

SEQ ID NO: 59 - protein, 462 aa, Artificial Sequence
  Synthetic Polypeptide
MAGFDCDTLVVGGGVSGLAAALTLKNRGVDVRLLESRGYLGGAIRTVREDGYLLEFGPNSLMVRPEDAIDTVLGDPELRARIVPASGLSKNRYVVKAGHLYPVPLSPWAFFRTPLLSWRGRRDILSEWKVPPRTGGPEETLSHFVRRRLGEEALDYFVDPFVKGVYASHPDLLSVEAAFPLLVRLEREHGGLLRGALKTFLKRRKRPSGSSPRGIFSFAGGMTDLVEAMGKRLGEDVGTNVDVIKYTRLEEGFRVALMYDETEYYMTSRRLILATSAPQAAELLEGDPDGPSSELKSIPYAPVTIAYAGFLREQVTHPLDGFGLLCPTVENRKVLGVIFSSSLFPGRAPEGKVLLTVFVGGMTGQKLAQAFDEDLERIVLKELTELLGVKGAPSFFRIHRWEKAIPQLILGHGETVRTIRKKLPSGLRLAGNYLDGISIARAFASGVRAAEELLSEDGGTPG

SEQ ID NO: 60 - protein, 467 aa, Artificial Sequence
  Synthetic Polypeptide
GCAAAYKLKLHGLNVTVFEADERVGGKLRSVSQDGLIWDEGANTMTESEADVSSLIDDLGLRDKQQFPISQHKRYIVRNGKPVLIPSNPIALIRSSFLSTQSKVQILLEPFLWKKTKSSDEPESVGGFFQRHFGKEVVEYLIDPVVAGTSGGDPESLSMRHAFPELWDLERRFGSIISGAFQSMVSSRGGKRKPSGNSKRRRGSFSFFGGMQTLTDALSKEIGPHEINLQSKVLEMSYSCDDNAVGNWSIYCAPDQNKQFQQSFDAVIMTAPLNNLKEMKITKTGSPFLLNFIPEVSYLPISVIISTFKKENVKQPLEGFGVLVPAKEQENGLRTLGTLFSSMMFPDRASEDVYLYTTFVGGSRNKELAKASRDELKQIVTSDLRQLLGTEGEPKFLTHYYWSKAFPLYGRDYGSVIEAIEKMEKELPGYFYAGNHKGGLSVGKAISSGCKAAESVIAYLDSYSNQK

SEQ ID NO: 61 - protein, 535 aa, Amaranthus
MVIQSITHLSPKLALPSPLSVSTKNYPVAVMGNISEREEPTSAKRVAVVGAGVSGLAAAYKLKSHGLNVTLFEADSRAGGKLKTVKKDGFIWDEGANTMTESEAEVSSLIDDLGLREKQQLPISQNKRYIARDGLPVLLPSNPAALLSSNILSAKSKLQIMLEPFLWRKRNATELSDEHVQESVGEFFERHFGKEFVDYVIDPFVAGTCGGDPQSLSVHHTFPDVWNVEKRFGSVFAGLIQSTLLSKKEKGGGENASIKKPRVRGSFSFHGGMQTLVDTMCKQIGEDELKLQCEVLSLSYNQKGIPSLGNWSVSSMSNNTSEDQSYDAVVVTAPIRNVKEMKIMKFGNPFSLDFIPEVTYVPLSVMITAFKKDKVKRPLEGFGVLIPSKEQHNGLKTLGTLFSSMMFPDRAPSDMCLFTTFVGGSRNRKLAKASTDELKQIVSSDLQQLLGTEDEPSFVNHLFWSNAFPLYGHNYDSVLRAIDKMEKDLPGFFYAGNHKGGLSVGKAMASGCKAAELVISYLDSHLYVKMNEKTA

SEQ ID NO: 62 - protein, 493 aa, Silene
TSDPDKLQSSAKRVAVIGAGVSGLAAAYKLKSNGLNVTLIEADERAGGKIRSAAKNGYIWDEGANTMTESESEVTSLLDDLGIRDKQQLPLSQNKRYVVRDGLPVLLPSGPISIFTSNFLSPKSKLRLLCEPFSWRRRDNAKVSDEQADESVSDFFGRHFGEEFVDYLIDPFVGGTSAADPKTISMRHSFPELWDIEDRFGSIIAGAIQSRLTPKPGEQKKPVKKTRVRGSFSFKGGMQTLVDTICERFSEDELKLKCKVLSLSYSHEGHSNNWSLSCLSNKSIEDRPYDAVVVTAPLTNVKDMKILNGGSPFSLDFVPEVDYLPVSIIVTAFKKANVERPLEGFGVLIPSKEQEKGLKTLGTLFSSMMFPDRSPADQYLYTTFVGGSRNRELARATTDELKQVVLSDLQQLLGVKGDPSFINHVYWSKAFPRYGQNYESVKMAIAKMENDLPGFFYAGNHKDGLSVGKALASGYKAADLVMSYLNSYSNTNQ

SEQ ID NO: 63 - protein, 493 aa, Silene
TSDPDKLQSSAKRVAVIGAGVSGLAAAYKLKSNGLNVTLIEADERAGGKIRSAAKNGYIWDEGANTMTESESEVTSLLDDLGIRDKQQLPLSQNKRYVVRDGLPVLLPSGPISIFTSNFLSAKSKLRLLCEPFSWRRRDNAKVSDEQADESVSDFFGRHFGEEFVDYLIDPFVGGTSAADPKTISMRHSFPELWDIEDRFGSIIAGAIQSRLTPKPGEQKKPVKKTRVCGSFSFKGGMQTLVDTICERFSEDELKLKCKVLSLSYSHEGHSNNWSLSCLSNKSIEDRPYDAVVVTAPLTNVKDMKILNGGSPFSLDFVPEVDYLPVSIIVTAFKKANVERPLEGFGVLIPSKEQEKGLKTLGTLFSSMMFPDRSPADQYLYTTFIGGSRNRELARATTDELKQVVLSDLQQLLGVKGDPSFINHVYWSKAFPRYGQNYESVKMAIAKMENDLPGFFYAGNHKDGLSVGKALASGYKAADLVMSYLNSYSNTNQ

SEQ ID NO: 64 - protein, 501 aa, Solanum
MAPSAGEDKQKRVAVIGAGVSGLAAAYKLKVHGLNVTVFEAEGRAGGKLRSLSQDGLIWDEGANTMTESEGDVTFLLDSLGLREKQQFPLSQNKRYIARNGTPTLIPSNPFDLFKSNFLSTGSKLQMLFEPLLWKNKKLTKVSDKHESVSGFFQRHFGKEVVDYLIDPFVAGTCGGDPDSLSMHLSFPDLWNLEKRFGSVIVGAIQSKLSPIKEKKQGPPRTSINKKRQRGSFSFLGGMQTLTDAICKNLKEDELRLNSRVLELSCSCSGDSAIDSWSIFSASPHKRQAEEESFDAVIMTAPLCDVKSMKIAKRGNPFLLNFIPEVDYVPLSVVITTFKKESVKHPLEGFGVLVPSQEQKHGLKTLGTLFSSMMFPDRAPNNVYLYTTFVGGSRNRELAKASRTELKEIVTSDLKQLLGAEGEPTYVNHLCWSKAFPLYGHNYDSVLDAIDKMEKSLPGLFYAGNHKGGLSVGKALSSGCNAADLVISYLEAVSADTKNHS

SEQ ID NO: 65 - protein, 463 aa, Artificial Sequence
  Synthetic Polypeptide
MATEDVETLVIGGGIAGLACASHLKLAGRTVRLVERNDYLGGVIRTLSDSGYRIETGPNSLLVRTEEPLLKYLSRPEIAARIQLAGRMGKKRFILKDGHPVALPMSLSEGIFTQILSLPAKVRLLKEPFIPPAGGVDGVDPEKETVADFVRRRLGNEFLESLIDPFVKGVYASDPHLLSMADTFPRLVQMEKSYGSLIKGGLALARQKKAPAPAFAREILSFSEGMGTLPESLANILDDDAGTNAEVIGCAPSESGFRTALLFEEETYYIRSKHLVLALPAAQTAELIEPMAPGIPSLLGQIPYAPIAVVYLGYPRDRISHPLDGFGLLVPSRERRKILGALFSSSLFPGRSPDGHVLLTVFVGGMTQPKLAQAFDEDLLPMVTKEIGSMLGVLGAPSYVRIQRWAGAIPQSVPGHGERIRSIESALPSGLHLAGSYLSGVSVSQTFSSGIRAAEKILAQSPG

SEQ ID NO: 66 - protein, 544 aa, Zea
MLALTASASSASSHPYRHASAHTRRPRLRAVLAMAGSDDPRAAPARSVAVVGAGVSGLAAAYRLRQSGVNVTVFEAADRAGGKIRTNSEGGFVWDEGANTMTEGEWEASRLIDDLGLQDKQQYPNSQHKRYIVKDGAPALIPSDPISLMKSSVLSTKSKIALFFEPFLYKKANTRNSGKVSEEHLSESVGSFCERHFGREVVDYFVDPFVAGTSAGDPESLSIRHAFPALWNLERKYGSVIVGAILSKLAAKGDPVKTRHDSSGKRRNRRVSFSFHGGMQSLINALHNEVGDDNVKLGTEVLSLACTFDGVPALGRWSISVDSKDSGDKDLASNQTFDAVIMTAPLSNVRRMKFTKGGAPVVLDFLPKMDYLPLSLMVTAFKKDDVKKPLEGFGVLIPYKEQQKHGLKTLGTLFSSMMFPDRAPDDQYLYTTFVGGSHNRDLAGAPTSILKQLVTSDLKKLLGVEGQPTFVKHVYWGNAFPLYGHDYSSVLEAIEKMEKNLPGFFYAGNNKDGLAVGSVIASGSKAADLAISYLESHTKHNNSH

SEQ ID NO: 67 - protein, 507 aa, Oryza
MAASDDPRGGRSVAVVGAGVSGLAAAYRLRKRGVQVTVFEAADRAGGKIRTNSEGGFIWDEGANTMTESELEASRLIDDLGLQGKQQYPNSQHKRYIVKDGAPTLIPSDPIALMKSTVLSTKSKLKLFLEPFLYEKSSRRTSGKVSDEHLSESVASFFERHFGKEVVDYLIDPFVAGTSGGDPESLSIRHAFPALWNLENKYGSVIAGAILSKLSTKGDSVKTGGASPGKGRNKRVSFSFHGGMQSLIDALHNEVGDGNVKLGTEVLSLACCCDGVSSSGGWSISVDSKDAKGKDLRKNQSFDAVIMTAPLSNVQRMKFTKGGVPFVLDFLPKVDYLPLSLMVTAFKKEDVKKPLEGFGVLIPYKEQQKHGLKTLGTLFSSMMFPDRAPNDQYLYTSFIGGSHNRDLAGAPTAVLKQLVTSDLRKLLGVEGQPTFVKHVHWRNAFPLYGQNYDLVLEAIAKMENNLPGFFYAGNNKDGLAVGNVIASGSKAADLVISYLESCTDQDN

SEQ ID NO: 68 - protein, 542 aa, Setaria
MLSSSTTTASPASSHPYRPAYPRASLRPVLAMAGSDDPRAAPARSVAVIGAGVSGLAAAYRLRKSGVNVTVFEAADRAGGKIRTNSEAGFLWDEGANTMTEGELEVSRLIDDLGLQDRQQYPNSQHKRYIVKDGAPALIPADPISLMKSSVLSTKSKLALFLEPFLYKKSNTRNSGKVSDEHLSESVGSFFERHFGREVVDYLIDPFVAGTSAGDPESLSIRHAFPALWNLERKYHSIIVGAILSKLTAKGDPVKTGSDLSGKRRNRRASFSFHGGMQSLINALHNEVGDDNVKLGTEVLSLACTFDGLPSTGGWSISVDSKDAGSKDLAKNQTFDAVIMTAPLSNVQRMKFRKGGAPFVLDFLPKVNYLPLSLMVTAFKKEDVKKPLEGFGVLIPYKEQQKHGLKTLGTLFSSMMFPDRAPDDQYLYTTFVGGSHNRDLAGAPTSILKQLVTSDLKKLLGVEGQPTFVKHIYWRNAFPLYGRDYGSVLDAIEKMEKNLPGFFYAGNNKDGLAVGNVIASGSKAAELAISYLESQTKHNNSH

SEQ ID NO: 69 - protein, 507 aa, Brachypodium
MAASDDPRAAPARSVAVVGAGVSGLVAAHRLRKSGVRVTVFEADDRAGGKIRTNSDSGFLWDEGANTMTESALEASRLIDDLGLQDKQQYPNSQHKRYTVKDGAPTLIPSDPIALMKSTVLSTKSKFKLFLEPFLYEKSHTRNSQKVSDNHLSESVGSFFERHFGKEVVDYLIDPFVAGTSAGDPESLSIRHAFPGLWDLEKKYGSIIVGAILSKLTAKGDSTKKADTSSGKGRNKQASFSFHGGMQTLVEGLHKDVGDGNVKLGTQVLSLACSCDRLSASDGWSISVNSKDASSKLAAKNQLFDAVIMTAPLSNVQRMKFTKGGVPFVLDFLPKVDYLPLSLMVTAFRKEDVKRPLEGFGVLIPYKEQQKYGLKTLGTLFSSMMFPDRAPNDQHLFTTFVGGSHNRDLAAAPTAILKQLVTSDLRKLLGVEGQPTFVKHVHWKNAFPLYGHDYDLALEAIGKMENELPGFFYAGNNKDGLAVGNVIASGSKTADLVISYLESHQAR

SEQ ID NO: 70 - protein, 551 aa, Oryza
MLSPAATTTTTTSYCSYSSRAHAPTRSASAGAARFRPARAMATSDNDPRGAAPARSVAVVGAGVSGLAAAYKLRKRGVQVTVFEAADRAGGKIRTNSESGFIWDEGANTMTESESEAGRLIDDLDLQGKLQYPNSQHKRYIVKDGAPTLIPSDPIGLMKSTVLSTKSKLKLFLEPFLYEKSSKRNSGKVSDEHLSESVASFFERHFGKEVVDYLIDPFVAGTSGGDPESLSIRHAFPALWNLENKYGSVIAGAILSKLSTKGESVKTGGATPGKGRNKRVSFSFHGGMQSLIDALHNEVGDGNVKLGTEVLSLACSCDEISSSGGWSIAVDSRDAKGKDLRKNQSFDAVIMTAPLSNVQRMKFTKNGAPFVLDFLPKVDYLPLSLMVTAFKKEDVKRPLEGFGVLIPYKEQQKHGLKTLGTLFSSMMFPNRAPNDQYLYTSFIGGSHNRDLAGASTAILKQLVTSDLRKLLGIEGQPTFVKHVHWGNAFPLYGRNYDLVLEAIAKMEKNLPGFFYAGNNKDGLAVGNVIASGSKAAELVLSYLESHTDQDN

SEQ ID NO: 71 - protein, 494 aa, Picris
MAEHIHTDQNDKRPLKSVAVVGAGISGLAAAYRLKSQGLAVTIFEADGTTGGKIKSFAQNGLIWEKGANTMTETEPEVGKLIDDLGIRGKQQFPIMQSKRYIVRDGKPQLLPSNPVAFIGSKTLSAQAKLNIFLEPILWKHKNSKEKTPNSPDIYQEESVGDFFRRHFGQEVVDYIVDPFVAGTAGADAESLSIRHMFPEIWDLEERFGSIITGAIKSSWSRKKAQRDAKHVTHGQKRQRGSFSFMGGLQTLTNALSKKLGEESLRMHCSVLSLSCNLQGNPPHNNWSVCYARNDASYKEPLKEQSFDAVVMTVTYLPMSIIITTFKKQDVKHPLEGFGILVPSKEEKNGFQTLGTLFSSNMFPDRAPTDQYLFTTFIGGNRNRKLAKSQLKDLQEVAVNDLNKILGVGSDPLSVKHIYWNEAFPLYSLDYNSVVAAIDKLGKSLPGIYFAGNYRGGLSVGKALTSGFKAADLAISDFNSKGLCTMIGTDHEVK

SEQ ID NO: 72 - protein, 506 aa, Oryza
MAASDDPRGGRSVAVVGAGVSGLAAAYRLRKRGVQVTVFEAADRAGGKIRTNSEGGFIWDEGANTMTESELEASRLIDDLGLQGKQQYPNSQHKRYIVKDGAPTLIPSDPIALMKSTVLSTKSKLKLFLEPFLYEKSSRRTSGKVSDEHLSESVIFLCICRDNQVVDYLIDPFVAGTSGGDPESLSIRHAFPALWNLENKYGSVIAGAILSKLSTKGDSVKTGGASPGKGRNKRVSFSFHGGMQSLIDALHNEVGDGNVKLGTEVLSLACCCDGVSSSGGWSISVDSKDAKGKDLRKNQSFDAVIMTAPLSNVQRMKFTKGGVPFVLDFLPKVDYLPLSLMVTAFKKEDVKKPLEGFGALIPYKEQQKHGLKTLGTLFSSMMFPDRAPNDQYLYTSFIGGSHNRDLAGAPTAILKQLVTSDLRKLLGVEGQPTFVKHVHWRNAFPLYGQNYDLVLEAIAKMENNLPGFFYAGNNKDGLAVGNVIASGSKAADLVISYLESCTDQDN

SEQ ID NO: 73 - protein, 465 aa, Artificial Sequence
  Synthetic Polypeptide
MDHLTVIIGAGLTGLTTAAFLRAAGRPVLVLERAAHIGGQIRTYREDGFVFETGPNTGTISSPEVAELFELLGLEPEIATPAASNRLIWKGNKLYPLPRNIAEAVGTPLFSLWDKWRILGEPFRRRGGQPNETVGALARRRLGKSFVDYAVDPFLGGIYAGDPDQLVTRFALPKLYDLEQRYGSFVLGAVRKARQPQSERDRKASRKVFSVQGGLGLLVEALADYIGREHILTETQIRYINHPGAHTFGLTYTDASEEEHTIPCRHLVSTVAAHHIPTLFDRFPANESAVFEQLYYAPMIEVAVGFRRNVATHLPAFGCLIPSRENRRILGILFPSDCFRGRAPEGGALYSIFMGGVRNASLIDLSDEEISTIAMEELRDMLHIPHTCKPDLLHISRHRHAIPQYYADTELRQDIIRRMEMRWPGLHLGGNMHGGIGMAHRISQGVEMARSIIEETAIAERSARG

SEQ ID NO: 74 - protein, 505 aa, Oryza
MAASDDPRGGRSVAVVGAGVSGLAAAYRLRKRGVQVTVFEAADRAGGKIRTNSEGGFIWDEGANTMTESELEASRLIDDLGLQGKQQYPNSQHKRYIVKDGAPTLIPSDPIALMKSTVLSTKSKLKLFLEPFLYEKSSRRTSGKVSDEHLSESMFSDQREYICSVIFLCICRDNQVVDYLIDPFVAGTSGGDPESLSIRHAFPALWNLENKYGSVIAGAILSKLSTKGDSVKTGGASPGKGRDKRVSFSFHGGMQSLIDALHNEVGDGNVKLGTEVLSLACCCDGVSSSGGWSISVDSKDAKGKDLRKNQSFDAVIMTAPLSNVQRMKFTKGGVPFVLDFLPKVDYLPLSLMVTAFKKEDVKKPLEGFGALIPYKEQQKHGLKTLGTLFSSMMFPDRAPNDQYLYTSFIGGSHNRDLAGAPTAILKQLVTSDLRKLLGVEGQPTFVKHVHWRNAFPLYGQNYDLVLEAIAKMENNLPGFFYAGKSMKAPLLYKRNLRYLKHIPVD

SEQ ID NO: 75 - protein, 461 aa, Salinibacter; identical to SEQ ID NO: 2

SEQ ID NO: 76 - protein, 469 aa, Rhodothermus; identical to SEQ ID NO: 3

SEQ ID NO: 77 - protein, 483 aa, Tribolium
NMSLRLVLFLVFCIGKVLGNFSVIVIGAGPSGIAAATKLLQHSVNVTVLEAENRIGGRINTVKFGDGLVELGAEYCHGEVGNIVKELVNGYDLLEPNFNYLNGEIYYSNGSKLDHGFVREMQDLILSENKEENYDTRGKSIGEVFMHKYNSTLVEKYKSDENKLKLLKEGLHFAERSILISEGSFSWFDASADSDWLECPGNQTLVWKGVGYKTVLEILMKSYPNPDEKLPLDDKLFLNSKVTKINWGEKPIKVHTSDKVYSADYVIFTPSIGVLKAGSDLFTPSLPPKKHKAIDSIGFAGVVKLFLRFPVKWWDDNDKYFAFFWSDDDLKSENFPEGPPEKRKIVGYPAVGLVPSWAQHQRLDDLDLGEMVPEIEQLPIETLKKGVNFTLEKFLGKDYNITEIGEVLRSGWVTNENFRGTYSFTRNGLYQKGVSYQNDLAEPLEGLFFAGEATNPVHFATVHGAIESGHREARRILDPRNKN

SEQ ID NO: 78 - protein, 453 aa, Tribolium
SVIIVGAGVSGISAAVKLFENGIANLKIFEAEDRIGGRIHTVKFGDNFIDLGAQYCHGENVVYDTVKDLDLLEHAQLFSTPKMYYSNGSHLDNQLTQDLQKVVSSYDHDITRSKELSLGDAFLKKYNSTILEKYKNDPENFKLASDGLTFAHSTILMHEGAFHWSRPASGRHYKAVKGDQMMVWKQRGYDMILDVLLKRYPDPSLKIPIEEKLFLNKRVTKITWTGDKASVKLSDGTSHEADHVIFTPSVGVLTHDDLFEPVVPPRKQQAIKSMGFDGIIKLILYFPEKWWHDSDSTFFFLWDRKDLEGITKEFNEGPSKDGISWVSNLVALVKVPSNPHVLIGWVSGGLIPEMEKMSLDVVKKGSMFVIRKFLGRDYNVTEPGEVLWSDWHNNPNFRGTYSYEKNGYFEEEVHYQDHLAEPLTQGTTPVVLFAGEATHPTHYSTVHGAIESG

SEQ ID NO: 79 - protein, 612 aa, Mycosphaerella
MASSSSPNHGKKAIVIGAGVGGVSTAARLAAAGFSVTVLEKNSFTGGRCSLIHHDGYRFDQGPSLLLLPHLFHATFADLGTTLEKEGVHLLKCEPNYNIHFGDGEKFTLSTDLSVMKEEIEKWEGKDGYDRYLAFLRESHAHYELSVTHVLLKNFTSLLSMLRISFLQHLVALHPFESIWSRASRYFWTERLRRVFTFGSMYMGMSPFDAPGTYSLLQYTELAEGIWYPVGGFHKVVGALVGIAERMGAEFRLETAVKRICVTADGARATGVELENGEVLEADVVVNNSDLVYAYNHLLQPQAYAESLSDRPGSCSSISFYWALDRKVPELSAHNIFLADDYRESFDSIFKKHLIPDQPSFYVNVPSRVDSTAAPEGKDTVVVLVPVGHLTGEAAASHFSQPASSPSKPNGGTIKSASPSTQTGIPPTLDQDWPAMIALARQTIIKTIHHRTGVDLHPLIIHEQSNDPVTWRSAFNLDKGAILGLSHSFFNVLCFRPSTRARRAGPLDPLLKYLSGLYMVGASAHPGTGVPIVLAGGKLVAEQVCGDMGVRVPWVVEEGRGKGKEEVKKLDRMEKPETWVKWVGILIALGMVPWILGWVVVLFLAKVASVGW

SEQ ID NO: 80 - protein, 936 aa, Mycosphaerella
MSIDTEEATCQVPVELSAGSESEEELNDIAEHELEDDFDPHFHREGQATPMVDIAGPASESQHQQPPAFSRWVSKLRRKRHNHPQLLSPRKERWTLDDFDTRAASPGQQYLSPGRHYHSDSQGSSVRFVTAVRSATATLASASMATLSRRTTRFRRGHQRSSIVSGSEIRLSIESRRSIIDEAAKQRARKRREKLEELIRTEESYVADVKALSNAYFTILAHQPTATSFARTSTQRTIADILHLHDDILGCLHRIVPFAEYDQTIARLPLPLRAHNRWHSMDAVPQRTTPNRSTLATIRQGRRSLNISRSSSDDAQVVLRCSPQTIAAVAKAFSDNMLRFAAYEDYGANYDLIQRDVDDTQRAISGWADFDKAIEAISAHVNPMRTREANRKRAMTVKDLLIKPIQRLPRYELLFSDLHKLTPACDDPISHAEIEELRLKLNSVCHRMNAAKENPARARALEMTWLIGDRLTFSSQVPRSIFLQLLGRVSLCGSLYIAYRSRDRIKGAYVICVLFESCLLLASCDEDQSKYSILVSITLANATIEETDNAKGLQCHTAPHAWKVVFEQGARMYELIFTACSAVESEVWRTHIASGIETQIAAVAEGKANVFELQSPLTADMKSIGKAFGKPGSFVRRMSVQRAATIGPTADLNQVIIKNTQAVKEVMDNSSQGSFQIPRSQSVATPSHVQTLAPRRADRHRLETILSDVWSRDLLPYPGMVRRSDPIRAGANHVIRKFSMASITSNFSSSKRTGSYTSMSSWRKEDMPPPRNRGESGREGSSMSSRQSRPPLIDFHTAPDAFLPADFEIGRPSKDKRKRSALRTFTMTMERPFTPLLGNENKQSGLRRAQSVKDVVDDQARPGPSPIQLKRREEKRTGTPVYSVVQERARTPAMLHVKDESLEMGMGVGEASNGAVAGKAPRKSKSRLLRLFGQER

SEQ ID NO: 81 - protein, 573 aa, Mycosphaerella
MLHSRSCTYRLLAPAVARRITPLVPSQCLLQTHRSRTYSAEAAPSHDVAVLGGGITGLAAAHYVTREHPRAKVTLYEASDRVGGWVSSKRADVHDGTVLFEGGPRTLRPNGNGVLAANASQMQELDLTKDAIFTQKSSPAAQNRFVYYPDHIVRMPHPSAGLFNNLWSLMTEPVFATALKSGFMEAFTTGRDGSIQDESIAEFFSRRLSPTMVDRILSAVIHGIYAGDVNKLSAKSLFPNQWRHEAKYDSLIKGVIQERAEGTMVTKREADFLQAMKVFEWDPLLKATLKDNSVFTFKDGLQMLPDRLHSRLFEDGRVEFKTGSPVESIVQSQGNSGIQVTTKGSTESKTHTHVISALSPEHLNTVCRHGSASSRLIDSIPTVTVMTVSMYFRTPDLHEPGFGYLIPQATPFENNPERALGVVFDTAYSPGSSDSRGTKVTVMLGGHWWDGWPAFPDEEEGVTMARAVLERHLGIKEAPEAWQVNLQADCIPQYTVGHETRLKKAHNNIWQEYKGRLRVAGNWMSGVGVNDCLRSAYEVARNLSKDGTGLQHVGEAPTLRMKPVRPGEKTEES

SEQ ID NO: 82 - protein, 239 aa, Apisum
KREGGIEKNQSIQIIEASDHTGGWIQSWKDENTNVISELGPRTIRGRGKSANNTYSLIKDLGIEDLVRNVGIDASARYIFANGNIHQLPMSVWKALFTVNQPFTKPWIYYVLRECFSSNNSKDKLSDVQNNDESAYDFFCRTFGQEFADYLISPLLCGVCGGNAKQMSVKFMFGALYEAERKHGTVGLGLLKEQLSSIWNREKVKDTKGTNTVKPPPSVYYLDGGLQRLIHALDIENES

SEQ ID NO: 83 - protein, 502 aa, Schizophyllum
MAPHHIAVLGGGLTGLSSAYHLSHRFPNALITLVERSTRVGGWAESERVSLKDPKDGSEASILIEGGPRTLRPTAKSVLELVTRLDLLDDLILVPRTSPSAKNKYFHMPGQPGLLAVPSSFKGLISSPLGACLTRAVAKEAMAFSNRDDLKDESFDSFLCRRFTAEFAEKVGSALVHGIFAADSRKLSVRAAFPVLWEAEEYGWGSVVRGFIRGRREEDVEESYYISNPVQKAMEETAVFSFRNGMDTVARATEHHLSKLKNVTILKGADVKSLGVNSKDKSIEVQIRPTHVVSTLPLPALHRVLTPTSNLPHLTTNPYSTVTVYNLIFRTDTPTPIHPAGFGYLIPRPPGGYEQPQANKEGILGCVFDSCALSAQDVMPGPTKYTKMTVMTGGPYQNKPPALDTVLQALARHLDWPEVYEPVYTRVRENRDCIPVPAPGHLERVAELRRVLKEGEWQGRMEVVGAGVGGVSVGDCVEAGRWVGEGWGPSTPQMEDDECDDE

SEQ ID NO: 84 - protein, 150 aa, Acinetobacter
MDAPSDAFLWVKALHIIAVVCWFAALFYLPRLYVYHAMSEDDTSHRRFEVMERKLYRGIMWPSMIATLITAHFLVDWGDATRHYHEALWFYIKVGLVGLLVIYHFVCGYYRKKLIGNAHYKSHKFWRYFNEMPTLILFAVVILVVVKPQF

SEQ ID NO: 85 - protein, 150 aa, Acinetobacter
MDAPSDAFLWVKALHIIAVVCWFAALFYLPRLYVYHAMSEDEISHRRFEIMERKLYRGIMWPSMIATLITAHFLVDWGDATRHYHEALWFYIKVGLVGLLVIYHFVCGYYRKKLIGNAHYKSHKFWRYFNEMPTLILFAVVILVVVKPQF

SEQ ID NO: 86 - protein, 150 aa, Acinetobacter
MDAPSDAFLWVKALHIIAVVCWFAALFYLPRLYVYHAMSEDEISHRRFEIMERKLYRGIMWPSMIATLITAHFLVDWGDATRHYHQALWFYIKVGLVGLLVIYHFVCGYYRKKLIGNAHYKSHKFWRYFNEMPTLILFAVVILVVVKPQF

SEQ ID NO: 87 - protein, 150 aa, Acinetobacter
MDAPSDAFLWVKALHIIAVVCWFAALFYLPRLYVYHAMSEDTVSHQRFEVMERKLYRGIMWPSMIATLITAHFLVDWGDATRHYHEALWFYLKVGLVGLLVIYHFVCGYYRKKLIGNAHYKSHKFWRFFNEMPTLILFAVVILVVVKPQF

SEQ ID NO: 88 - protein, 150 aa, Acinetobacter
MDAPSDAFLWVKALHIIAVVCWFAALFYLPRLYVYHAMSEDAVSHQRFEVMERKLYRGIMWPSMIATLITAHFLVDWGDATRHYHEALWFYLKVGLVGLLVIYHFVCGYYRKKLIGNAHYKSHKFWRFFNEMPTLILFAVVILVVVKPQF

SEQ ID NO: 89 - protein, 150 aa, Acinetobacter
MDAPSDAFLWVKALHIIAVVCWFAALFYLPRLYVYHAMSEDAVSHQRFEVMERKLYRGIMWPSMIATLITAHFLVDWGDATRHYHEALWFYLKVGMVGLLVIYHFVCGYYRKKLIGNAHYKSHKFWRFFNEMPTLILFAVVILVVVKPQF

SEQ ID NO: 90 - protein, 150 aa, Acinetobacter
MDAPSDAFLWVKALHIIAVVCWFAALFYLPRLYVYHAMSEDVVSHQRFEVMERKLYRGIMWPSMIATLITAHFLVDWGDATRHYHEALWFYLKVGLVGLLVIYHFVCGYYRKKLIGNAHYKSHKFWRFFNEMPTLILFAVVILVVVKPQF

SEQ ID NO: 91 - protein, 150 aa, Acinetobacter
MDAPSDAFLWVKALHIIAVVCWFAALFYLPRLFVYHAMSEDTVSHQRFEVMERKLYRGIMWPSMIATLITAHFLVDWGDATRHYHEALWFYLKVGLVGLLVIYHFVCGYYRKKLIGNAHYKSHKFWRFFNEMPTLILFAVVILVVVKPQF

SEQ ID NO: 92 - protein, 150 aa, Acinetobacter
MDAPSDAFLWVKALHIIAVVCWFAALFYLPRLYVYHAMSEDAVSHQRFEVMERKLYRGIMWPSMIATLITAHFLVDWGDASRHYHEALWFYLKVGLVGLLVIYHFVCGYYRKKLIGNAHYKSHKFWRFFNEMPTLILFAVVILVVVKPQF

SEQ ID NO: 93 - protein, 150 aa, Acinetobacter
MDAPSDAFLWVKALHIIAVVCWFAALFYLPRLFVYHAMSEDAVSHQRFEVMERKLYRGIMWPSMIATLITAHFLVDWGDATRHYHEALWFYLKVGLVGLLVIYHFVCGYYRKKLIGNAHYKSHKFWRFFNEMPTLILFAVVILVVVKPQF

SEQ ID NO: 94 - protein, 150 aa, Acinetobacter
MDAPSDAFLWVKALHIIAVVCWFAALFYLPRLFVYHAMSEDAVSHQRFEVMERKLYRGIMWPSMIATLITAHFLVDWGDATRHYHEALWFYLKVGLVGLLVIYHFICGYYRKKLIGNAHYKSHKFWRFFNEMPTLILFAVVILVVVKPQF

SEQ ID NO: 95 - protein, 150 aa, Acinetobacter
MDAPSDAFLWVKALHIIAVVCWFAALFYLPRLYVYHAMSEDAVSHQRFEVMERKLYRGIMWPSMIATLITAHFLVDWGDATRHYHEALWFYLKVGLVGLLVIYHLVCGYYRKKLIGNAHYKSHKFWRFFNEMPTLILFAVVILVVVKPQF

SEQ ID NO: 96 - protein, 150 aa, Acinetobacter
MDAPSDAFLWVKALHIIAVVCWFAALFYLPRLFVYHAMSEDAVSHQRFEVMERKLYRGIMWPSMIATLITAHFLVDWGDASRHYHEALWFYLKVGLVGLLVIYHFVCGYYRKKLIGNAHYKSHKFWRFFNEMPTLILFAVVILVVVKPQF

SEQ ID NO: 97 - protein, 150 aa, Acinetobacter
MDAPSDAFLWVKALHIIAVVCWFAALFYLPRLYVYHAMSEDAVSHQRFEVMERKLYRGIMWPSMIATLITAHFLVDWGDATRHYHEALWFYLKVGLVGLLVIYHLVCGYYRKKLIGNAHYKTHKFWRFFNEMPTLILFAVVILVVVKPQF

SEQ ID NO: 98 - protein, 150 aa, Acinetobacter
MDAPSDAFLWVKALHIIAVVCWFAALFYLPRLFVYHAMSEDALSHQRFEVMERKLYRGIMWPSMIATLITAHFLVDWGDATRHYHDALWFYLKVGLVGLLVIYHFVCGYYRKKLIGNAHYKSHKFWRFFNEMPTLILFAVVILVVVKPQF

SEQ ID NO: 99 - protein, 150 aa, Acinetobacter
MDAPSDAFLWVKALHIIAVVCWFAALFYLPRLYVYHAMSEDAISHQRFEVMERKLYRGIMWPSMIATLITAHFLVDWGDATRHYHEALWFYLKVGLVGLLVIYHLVCGYYRKKLIGNAHYKTHKFWRFFNEMPTLILFAVVILVVVKPQF

SEQ ID NO: 100 - protein, 150 aa, Acinetobacter
MDAPSDAFLWVKALHIIAVVCWFAALFYLPRLYVYHAMSEDKVSHQRFEVMERKLYRGIMWPSMLATLITAHFLVDWGDATRHYHEALWFYLKVGLVGLLVIYHFVCGYYRKKLISNAHYKSHQFWRFFNEMPTLILFAVVILVVVKPQF

SEQ ID NO: 101 - protein, 150 aa, Acinetobacter
MDAPSDAFLWVKALHIIAVVCWFAALFYLPRLYVYHAMSEDEISHQRFEVMERKLYRGIMWPSMIATLVTAHFLVEWGDATRHYHEAIWFYLKVGLVGLLVIYHFVCGYYRKKLIGNAHYKSHKFWRFFNEMPTLLLFAIIILVVVKPQF

SEQ ID NO: 102 - protein, 150 aa, Acinetobacter
MDAPSDAFLWVKALHIIAVVCWFAALFYLPRLYVYHAMSEDAISHQRFEVMERKLYRGIMWPSMIATLVTAHFLVEWGDATRHYHEALWFYLKVGLVGLLVIYHFVCGYYRKKLIGNAHYKSHKFWRFFNEMPTLLLFAIIILVVVKPQF

SEQ ID NO: 103 - protein, 150 aa, Acinetobacter
MDAPSDAFLWVKALHIIAVVCWFAALFYLPRLYVYHAMSDDAVSHQRFEVMERKLYRGIMWPSMIATLITAHFLVDWGDATRHYHEALWFYLKVGLVGLLVIYHFVCGYYRKKLIGNAHYKSHKFWRFFNEMPTLILFAVVILVVVKPTF

SEQ ID NO: 104 - protein, 150 aa, Acinetobacter
MDAPSDAFLWVKALHIIAVVCWFAALFYLPRLYVYHAMSEDAISHQRFEVMERKLYRGIMWPSMIATLLTAHFLVDWGDATRHYHEALWFYMKVGLVGLLVIYHFVCGYYRKKLIGNAHYKSHRFWRFFNEMPTLLLFAIIILVVVKPQF

SEQ ID NO: 105 - protein, 150 aa, Acinetobacter
MDAPSDAFLWVKALHIIAVVCWFAALFYLPRLYVYHAMSEDAVSHQRFEVMERKLYRGIMWPSMIATLITAHFLVDWGDATRHYHDALWFYLKVGLVGLLVIYHFVCGYYRKKLIGHAHYKSHKFWRFFNEMPTLILFAVVILVVVKPQF

SEQ ID NO: 106 - protein, 150 aa, Acinetobacter
MDAPSEAFLWVKALHIIAVVCWFAALFYLPRLYVYHAMSEDTVSHQRFEIMERKLYRGIMWPSMIATLITAHFLVDWGDATRHYHEALWFYLKVGLVGLLVIYHFVCGYYRKKLIGNAHYKSHKFWRFFNEMPTLILFAVIILVVVKPTF

SEQ ID NO: 107 - protein, 150 aa, Acinetobacter
MDAPSDAFLWVKALHIIAVVCWFAALFYLPRLYVYHAMSEDAISHQRFEVMERKLYRGIMWPSMIATLVTAHFLVEWGDATRHYHEAIWFYLKVGLVGLLVIYHFVCGYYRKKLIGNAHYKSHKFWRFFNEMPTLLLFAIIILVVVKPQF

SEQ ID NO: 108 - protein, 150 aa, Acinetobacter
MDAPSDAFLWVKALHIIAVVCWFAALFYLPRLYVYHAMSDDATSHQRFEVMERKLYRGIMWPSMIATLITAHFLVDWGDATRHYHEATWFYLKVGLVALLVIYHLVCGYYRKKLIGNAHYKSHKFWRFFNEMPTLILFAVVILVVVKPQF

SEQ ID NO: 109 - protein, 150 aa, Acinetobacter
MDAPSDAFLWVKALHIIAVVCWFAALFYLPRLYVYHAMSEDAVSHQRFEVMERKLYRGIMWPSMIATLVTAHFLVDWGDATRHYHDALWFYLKVGLVGLLVIYHLVCGYYRKKLIGNAHYKSHRFWRFFNEMPTLILFAVVILVVVKPQF

SEQ ID NO: 110 - protein, 150 aa, Acinetobacter
MDAPSDAFLWVKALHIIAVVCWFAALFYLPRLYVYHAMSEDAVSHQRFEVMERKLYRGIMWPAMLATLITAHFLVDWGDATRHYHEALWFYLKVGLVGLLVIYHLVCGYYRKKLIGNAHYKSHKFWRYFNEMPTLILFAVVILVVVKPTF

SEQ ID NO: 111 - protein, 150 aa, Acinetobacter
MDAPSDAFLWVKALHIIAVVCWFAALFYLPRLFVYHAMSEDALSHQRFEVMERKLYRGIMWPSMIATLITAHFLVDWGDATRHYHDALWFYLKVGLVGLLVIYHLVCGYYRKKLIGNAHYKSHKFWRFFNEMPTLILFAVVILVVVKPQF

SEQ ID NO: 112 - protein, 150 aa, Acinetobacter
MDAPSDAFLWVKALHIIAVVCWFAALFYLPRLYVYHAMSEDAASHQRFEVMERKLYRGIMWPSMIATLITAHFLVDWGDATRHYHEATWFYLKVGLVALLVIYHLVCGYYRKKLIGNAHYKSHKFWRFFNEMPTLILFAVVILVVVKPQF

SEQ ID NO: 113 - protein, 150 aa, Acinetobacter
MDAPSDAFLWVKALHIIAVVCWFAALFYLPRLYVYHAMSEDEISHQRFEVMERKLYRGIMWPSMIATLVTAHLLVEWGDATRHYHEAIWFYLKVGLVGLLVIYHFVCGYYRKKLIGNAHYKSHKFWRFFNEMPTLLLFAIIILVVVKPQF

SEQ ID NO: 114 - protein, 150 aa, Acinetobacter
MDAPSDAFLWVKALHIIAVVCWFAALFYLPRLYVYHAMSDDATSHQRFEVMERKLYRGIMWPSMIATLITAHFLVEWGDATRHYHEATWFYLKIGLVALLVVYHFVCGYYRKKLIGNAHYKSHKFWRFFNEMPTLILFAVVILVVVKPQF

SEQ ID NO: 115 - protein, 150 aa, Unknown
  Bacterial
MDAPSDAFLWVKALHIIAVVCWFAALFYLPRLYVYHAMSDDAVSHQRFEVMERKLYRGIMWPAMIATLITAHFLVDWGDATRHYHEALWFYLKVGLVGLLVIYHFVCGYYRKKLIGNAHYKSHKFWRFFNEMPTLILFAVVILVVVKPTF

SEQ ID NO: 116 - protein, 150 aa, Acinetobacter
MDAPSDAFLWVKALHIIAVVCWFAALFYLPRLYVYHAMSEDAISHQRFEVMERKLYRGIMWPAMLATLITAHFLVDWGDATRHYHEALWFYLKVGLVGLLVIYHLVCGYYRKKLIGNAHYKSHKFWRYFNEMPTLILFAVVILVVVKPTF

SEQ ID NO: 117 - protein, 150 aa, Acinetobacter
MDAPSDAFLWVKALHIIAVVCWFAALFYLPRLYVYHAMSDDATSHQRFEIMERKLYRGIMWPSMIATLITAHFLVDWGDATRHYHEATWFYLKVGLVALLVIYHLVCGYYRKKLIGNAHYKSHKFWRFFNEMPTLILFAVVILVVVKPQF

SEQ ID NO: 118 - protein, 150 aa, Acinetobacter
MDAPSDAFLWVKALHIIAVVCWFAALFYLPRLYVYHAMSEDAVSHQRFEVMERKLYRGIMWPSMIATLVTAHFLVDWGDATRHYHEALWFYLKVALVGLLVIYHLVCGYYRKKLIGNAHYKSHKFWRFFNEMPTVILFAVVILVVVKPQF

SEQ ID NO: 119 - protein, 150 aa, Acinetobacter
MDAPSDAFLWVKALHIIAVVCWFAALFYLPRLYVYHAMSDDTVSHQRFEVMERKLYRGIMWPSMVATLITAHFLVDWGDATRHYHEALWFYIKVALVGLLVIYHFVCGYYRKKLIGNAHYKSHKFWRFFNEMPTLILFAVVILVVVKPHF

SEQ ID NO: 120 - protein, 150 aa, Acinetobacter
MDAPSDAFLWVKALHIIAVVCWFAALFYLPRLYVYHAMSEDAASHQRFEVMERKLYRGIMWPSMIATLITAHFLVDWGDATRHYHQATWFYLKVGLVALLVIYHLVCGYYRKKLIGNAHYKSHKFWRFFNEMPTLILFAVVILVVVKPQF

SEQ ID NO: 121 - protein, 150 aa, Acinetobacter
MDAPSEAFLWVKALHIIAVVCWFAALFYLPRLFVYHAMSDDNLSHQRFEIMERKLYRGIMWPSMIATLITAHFLVDWGDATRHYHEALWFYLKVGLVGLLVIYHFVCGYYRKKLIGNAHYKSHKFWRFFNEMPTLILFAVVILVVVKPTF

SEQ ID NO: 122 - protein, 150 aa, Acinetobacter
MDAPSDAFLWVKALHIIAVVCWFAALFYLPRLYVYHAMSDDATSHHRFEVMERKLYRGIMWPSMIATLITAHFLVDWGDATRHYHEATWFYLKVGLVALLVIYHLVCGYYRKKLIGNAHYKSHKFWRFFNEMPTLILFAVVILVVVKPQF

SEQ ID NO: 123 - protein, 150 aa, Acinetobacter
MDAPSDAFLWVKALHIIAVVCWFAALFYLPRLYVYHAMSDDATSHQRFEVMERKLYRGIMWPSMIATLITAHFLVEWGDATRHYHEATWFYLKVGLVALLVIYHLVCGYYRKKLIGNAHYKSHKFWRFFNEMPTLILFAVVILVVVKPQF

SEQ ID NO: 124 - protein, 150 aa, Acinetobacter
MDAPSNAFLWVKALHIIAVVCWFAALFYLPRLYVYHAMSDDATSHQRFEVMERKLYRGIMWPSMIATLITAHFLVDWGDATRHYHEATWFYLKVGLVALLVIYHLVCGYYRKKLIGNAHYKSHKFWRFFNEMPTLILFAVVILVVVKPQF

SEQ ID NO: 125 - protein, 150 aa, Acinetobacter
MDAPSDAFLWVKALHIIAVVCWFAALFYLPRLYVYHAMSEDVISHQRFEVMERKLYRGIMWPSMIATLLTAHFLVDWGDATRHYHEALWFYLKVSLVGLLVIYHFVCGYYRKKLIGNAHYKSHRFWRFFNEMPTLLLFAIIILVVVKPQF

SEQ ID NO: 126 - protein, 150 aa, Acinetobacter
MDAPSDAFLWVKALHIIAVVCWFAALFYLPRLYVYHAMSDDATSHQRFEVMERKLYRGIMWPSMIATLITAHFLVDWGDATRHYHEATWFYLKVGLVALLVIYHLVCGYYRKKLIGNAHYKSHKFWRFFNEMPTFILFAVVILVVVKPQF

SEQ ID NO: 127 - protein, 150 aa, Acinetobacter
MDAPSDAFLWVKALHIIAVVCWLAALFYLPRLYVYHAMSDDATSHQRFEVMERKLYRGIMWPSMIATLITAHFLVDWGDATRHYHEATWFYLKVGLVALLVIYHLVCGYYRKKLIGNAHYKSHKFWRFFNEMPTLILFAVVILVVVKPQF

SEQ ID NO: 128 - protein, 150 aa, Acinetobacter
MDAPSDAFLWVKALHIIAVVCWFAALFYLPRLYVYHAMSDDAVSHQRFEVMERKLYRGIMWPSMIATLITAHFLVDWGDATRHYHEALWFYLKVGLVGLLVIYHFVCGYYRKKLIGHAHYKSHKFWRFFNEMPTLILFAVVILVVVKPTF

SEQ ID NO: 129 - protein, 150 aa, Acinetobacter
MDAPSDAFLWVKALHIIAVVCWFAALFYLPRLYVYNAMSDDATSHQRFEVMERKLYRGIMWPSMIATLITAHFLVDWGDATRHYHEATWFYLKVGLVALLVIYHLVCGYYRKKLIGNAHYKSHKFWRFFNEMPTLILFAVVILVVVKPQF

SEQ ID NO: 130 - protein, 150 aa, Acinetobacter
MDAPSDAFLWVKALHIIAVVCWFAALFYLPRLYVYHAMSDDAASHQRFEVMERKLYRGIMWPSMIATLITAHFLVDWGDATRHYHEATWFYLKVGLVALLVIYHLVCGYYRKKLIGNAHYKSHKFWRFFNEMPTLILFAVVILVVVKPQF

SEQ ID NO: 131 - protein, 150 aa, Acinetobacter
MDAPSDAFLWVKALHIIAVVCWFAALFYLPRLYVYHAMSDDAASHQRFEVMERKLYRGIMWPSMIATLITAHFLVEWGDATRHYHEATWFYLKVGLVALLVVYHFVCGYYRKKLIGNAHYKSHKFWRFFNEMPTLILFAVVILVVVKPQF

SEQ ID NO: 132 - protein, 150 aa, Acinetobacter
MDAPSDAFLWVKALHIIAVVCWFAALFYLPRLYVYHAMSEDAASHQRFEVMERKLYRGIMWPSMIATLITAHFLVEWGDATRHYHEATWFYLKVGLVALLVVYHLVCGYYRKKLIGNAHYKSHKFWRFFNEMPTLILFAVVILVVVKPQF

SEQ ID NO: 133 - protein, 150 aa, Acinetobacter
MDAPSDAFLWVKALHIIAVVCWFAALFYLPRLYVYHAMSEDAVSHQRFEVMERKLYRGIMWPAMLATLITAHFLVDWGDATRHYHEALWFYLKVGLVGLLVIYHLVCGYYRKKLINNAHYKSHKFWRYFNEMPTLILFAVVILVVVKPTF

SEQ ID NO: 134 - protein, 150 aa, Acinetobacter
MDAPSDAFLWVKALHIIAVVCWFAALFYLPRLYVYHAMSEDAASHQRFEVMERKLYRGIMWPSMIATLITAHFLVEWGDATRHYHQATWFYLKVGLVALLVIYHLVCGYYRKKLIGNAHYKSHKFWRFFNEMPTLILFAVVILVVVKPQF

SEQ ID NO: 135 - protein, 150 aa, Acinetobacter
MDAPSDAFLWVKALHIIAVVCWFAALFYLQRLYVYHAMSDDATSHQRFEVMERKLYRGIMWPSMIATLITAHFLVDWGDATRHYHEATWFYLKVGLVALLVIYHLVCGYYRKKLIGNAHYKSHKFWRFFNEMPTLILFAVVILVVVKPQF

SEQ ID NO: 136 - protein, 150 aa, Acinetobacter
MDAPSEAFLWVKALHIIAVVCWFAALFYLPRLFVYHAMSDDNLSHQRFEIMERKLYRGIMWPSMIATLITAHFLVDWGDATRHYHEALWFYLKVGLVGLLVIYHFACGYYRKKLIGNAHYKSHKFWRFFNEMPTLILFAVVILVVVKPTF

SEQ ID NO: 137 - protein, 150 aa, Acinetobacter
MDAPSDAFLWVKALHIIAVVCWFAALFYLPRLYVYHAMSEDTASHQRFEVMERKLYRGIMWPSMIATLITAHFLVDWGDATRHYHQATWFYLKVGLVALLVIYHLACGYYRKKLIGNAHYKSHKFWRFFNEMPTLILFAVIILVVVKPQF

SEQ ID NO: 138 - protein, 150 aa, Acinetobacter
MDAPSDAFLWVKALHIIAVVCWFAALFYLPRLYVYHAMSEDAVSHQRFEVMERKLYRGIMWPSLIATLITAHFLVDWGDATRHYHQATWFYLKVGLVALLVIYHLVCGYYRKKLIGNAHYKSHKFWRFFNEMPTLILFAVVILVVVKPQF

SEQ ID NO: 139 - protein, 150 aa, Acinetobacter
MDAPSDAFLWVKALHIIAVVCWFAALFYLPRLYVYHAMSKDAASHQRFEVMERKLYRGIMWPSMIATLITAHFLVDWGDATRHYHQATWFYLKVGLVALLVIYHLVCGYYRKKLIGNAHYKSHKFWRFFNEMPTLILFAVVILVVVKPQF

SEQ ID NO: 140 - protein, 150 aa, Acinetobacter
MDAPSDAFLWVKALHIIAVVCWFAALFYLPRLYVYHAMSEDAVSHQRFEVMERKLYRGIMWPAMLATLITAHFLVDWGDATRHYHEALWFYLKVGLVGLLVIYHLVCGYYRKKLIDNAHYKSHKFWRYFNEMPTLILFAVVILVVVKPTF

SEQ ID NO: 141 - protein, 150 aa, Acinetobacter
MDAPSDAFLWVKALHIIAVVCWFAALFYLPRLYVYHAMSEDAASHQRFEVMERKLYRGIMWPSMIATLITAHFLVEWGDATRHYHQATWFYLKVGLVTLLVIYHLVCGYYRKKLIGNAHYKSHKFWRFFNEMPTLILFAVVILVVVKPQF

SEQ ID NO: 142 - protein, 150 aa, Acinetobacter
MDAPTDAFLWVKALHIIAVVCWFAALFYLPRLYVYHAMSEDTISHQRFEVMERKLYRGIMWPSMIATLITAHFLVDWGDATQHYHQAVWFYLKVALVALLVIYHFVCGYYRKKLIGNAHYKSHKFWRFFNEMPTLILFAVVILVVVKPQF

SEQ ID NO: 143 - protein, 150 aa, Acinetobacter
MDAPSDAFLWVKALHIIAVVCWFAALFYLPRLYVYHAMSDDATSHQRFEVMERKLYRGIMWPSMIATLITAHFLVEWGDATRHYHEATWFYLKVGLVALLVIYNLVCGYYRKKLIGNAHYKSHKFWRFFNEMPTLILFAVVILVVVKPQF

SEQ ID NO: 144 - protein, 150 aa, Acinetobacter
MDAPSDAFLWVKALHIIAVVCWFAALFYLPRLYVYHAMSDDAVSHQRFEVMERKLYRGIMWPSMIATLITAHFLVEWGDATRHYHEALWFYLKVGLVGLLVIYHFVCGYYRKKLIGHAHYKSHKFWRFFNEMPTLILFAVVILVVVKPTF

SEQ ID NO: 145 - protein, 150 aa, Acinetobacter
MDAPSDAFLWVKALHIIAVVCWFAALFYLPRLYVYHAMSEDAASHQRFEVMERKLYRGIMWPSMIATLITAHFLVEWGDATRHYHDATWFYLKVGLVALLVIYHLVCGYYRKKLIGNAHYKSHKFWRFFNEMPTLILFAVVILVVVKPQF

SEQ ID NO: 146 - protein, 150 aa, Acinetobacter
MDAPSDAFLWVKALHIIAVVCWFAALFYLPRLYVYHAMSDDAASHQRFEVMERKLYRGIMWPSMIATLITAHFLVEWGDATRHYHEATWFYLKVGLVALLVIYHLVCGYYRKKLIGNAHYKSHKFWRFFNEMPTLILFAVVILVVVKPQF

SEQ ID NO: 147 - protein, 150 aa, Acinetobacter
MDVPSDAFLWVKALHIIAVVCWFAALFYLPRLYVYHAMSDDATSHQRFEVMERKLYRGIMWPSMIATLITAHFLVEWGDATRHYHEATWFYLKVGLVALLVIYHLVCGYYRKKLIGNAHYKSHKFWRFFNEMPTLILFAVVILVVVKPQF

SEQ ID NO: 148 - protein, 150 aa, Acinetobacter
MDAPSDAFLWVKALHIIAVVCWFAALFYLPRLYVYHAMSEDTVSHQRFEVMERKLYRGIMWPAMLATLITAHFLVDWGDATRHYHEALWFYLKVGLVGLLVIYHLVCGYYRKKLIDNAHYKSHKFWRYFNEMPTLLLFAVVILVVVKPTF

SEQ ID NO: 149 - protein, 150 aa, Acinetobacter
MDAPSDAFLWVKALHIIAVVCWFAALFYLPRLYVYHAMSEDAASHQRFEVMERKLYRGIMWPSMIATLITAHFLVEWGDATRHYHQATWFYLKVGLVALLMIYHLVCGYYRKKLIGNAHYKSHKFWRFFNEMPTLILFAVVILVVVKPQF

SEQ ID NO: 150 - protein, 150 aa, Acinetobacter
MDAPSDAFLWVKALHIIAVVCWFAALFYLPRLYVYHAMSEDAVSHQRFEVMERKLYRGIMWPAMLATLITAHFLVDWGDATRHYHEALWFYLKVGLVGLLVIYHLVCGYYRKKLIDNAHYKSHKFWRYFNEMPTLLLFAVVILVVVKPTF

SEQ ID NO: 151 - protein, 150 aa, Acinetobacter
MDAPSDAFLWVKALHIIAVVCWFAALFYLPRLYVYHAMSEDAVSHQRFEVMERKLYRGIMWPSLIATLITAHFLVDWGDATRHYHQATWFYLKVGLVALLVIYHLACGYYRKKLIGNAHYKSHKFWRFFNEMPTLILFAVVILVVVKPQF

SEQ ID NO: 152 - protein, 150 aa, Acinetobacter
MDAPSDAFLWVKALHIIAVVCWFAALFYLPRLYVYHAMSEDAASHQRFEIMERKLYRGIMWPSMIATLITAHFLVEWGDATRHYHQATWFYLKVGLVALLVIYHLVCGYYRKKLIGNAHYKSHRFWRFFNEMPTLILFAVVILVVVKPQF

SEQ ID NO: 153 - protein, 150 aa, Acinetobacter
MDAPSDAFLWVKALHIIAVVCWFAALFYLPRLYVYHAMSEDAVSHQRFEVMERKLYRGIMWPAMLATLITAHFLVDWGDATRHYHEALWFYLKVGLVGLLVIYHLICGYYRKKLINNAHYKSHKFWRYFNEMPTLILFAVVILVVVKPTL

SEQ ID NO: 154 - protein, 150 aa, Acinetobacter
MDAPSDAFLWVKALHIIAVVCWFAALFYLPRLYVYHAMSDDAISHQRFEVMERKLYRGIMWPAMIATLITAHFLVDWGDATRHYHEALWFYLKVGLVGLLVIYHLMCGYYRKKLIDNAHYKSHKFWRYFNEMPTLILFAVVILVVVKPTF

SEQ ID NO: 155 - protein, 150 aa, Acinetobacter
MDAPSDAFLWVKALHIIAVVCWFAALFYLPRLYVYHAMSEDAASHQRFEIMERKLYRGIMWPSMIATLITAHFLVEWGDATRHYHQATWFYLKVALVALLVIYHLVCGYYRKKLIGNAHYKSHKFWRFFNEMPTLILFAVVILVVVKPQF

SEQ ID NO: 156 - protein, 150 aa, Acinetobacter
MDAPSDAFLWVKALHIIAVVCWFAALFYLPRLYVYHAMSDDAVSHQRFEVMERKLYRGIMWPSMIATLITAHFLVDWGDATRHYHEALWFYLKVGLVGLLVIYHFVCGYYRKKLIRHAHYKSHKFWRFFNEMPTLILFAVVILVVVKPTF

SEQ ID NO: 157 - protein, 150 aa, Acinetobacter
MDAPSDAFLWVKALHIIAVVCWFAALFYLPRLYVYHAMSEDTVSHERFQVMERKLYRGIMWPAMVATLITAHFLVDWGDATRHYHEALWFYLKVGLVGLLVIYHLVCGYYRKKLIENAHYKSHKFWRFFNEMPTLILFAVVILVVVKPTF

SEQ ID NO: 158 - protein, 150 aa, Acinetobacter
MDAPSDAFLWVKALHIIAVVCWFAALFYLPRLYVYHAMSEDAASHQRFEVMERKLYRGIMWPSMIATLITAHFLVEWGDATRHYHQATWFYLKVALVALLVIYHLVCGYYRKKLIGNAHYKSHRFWRFFNEMPTLILFAVVILVVVKPQF

SEQ ID NO: 159 - protein, 150 aa, Acinetobacter
MDAPSDAFLWVKALHIIAVVCWFAALFYLPRLYVYHAMSEDAVSHQRFEVMERKLYRGIMWPSLIATLITAHFLVDWGDATRHYHQATWFYLKVALVALLVIYHLACGYYRKKLIGNAHYKSHKFWRFFNEMPTLILFAVVILVVVKPQF

SEQ ID NO: 160 - protein, 150 aa, Acinetobacter
MDAPSDAFLWVKALHIIAVVCWFAALFYLPRLYVYHAMSEDAVSHQRFEVMERKLYRGIMWPAMLATLITAHFLVDWGDATRHYHEALWFYLKVGLVGLLVIYHLVCGHYRKKLMENAHYKSHKFWRYFNEMPTLILFAVVILVVVKPTF

SEQ ID NO: 161 - protein, 150 aa, Acinetobacter
MDAPSDAFLWVKALHIIAVVCWFAALFYLPRLYVYHAMSEDVVSHQRFEIMERKLYRGIMWPAMVATLITAHFLVDWGDATRHYHEALWFYLKVGLVGLLVIYHLVCGYYRKKLMENAHYKSHKFWRFFNEMPTLILFAVVILVVVKPTF

SEQ ID NO: 162 - protein, 150 aa, Acinetobacter
MDAPSDAFLWVKALHIIAVVCWFAALFYLPRLYVYHAMSEDAASHQRFEVMERKLYRGIMWPSMIATLITAHFLVEWGDATRHYHQATWFYLKVALVALLIIYHLVCGYYRKKLIGNAHYKSHRFWRFFNEMPTLILFAVVILVVVKPQF

SEQ ID NO: 163 - protein, 150 aa, Acinetobacter
MDAPSDAFLWVKALHIIAVVCWFAALFYLPRLYVYHAMSEDAASHQRFEIMERKLYRGIMWPSMIATLITAHFLVEWGDATRHYHQATWFYLKVALVALLVIYHLVCGYYRKKLIGNAHYKSHRFWRFFNEMPTLILFAVVILVVVKPQF

SEQ ID NO: 164 - protein, 150 aa, Acinetobacter
MDAPTDAFLWVKALHIIAVVCWFAALFYLPRLYVYHAMSEDTISHQRFEVMERKLYRGIMWPSMIATLITAHFLVDWGDGTQHYHQAGWFYLKVALVALLVIYHFVCGYYRKKLIGNAHYKSHKFWRFFNEMPTLILFAVVILVVVKPQF

SEQ ID NO: 165 - protein, 150 aa, Acinetobacter
MDAPSDAFLWVKALHIIAVVCWFAALFYLPRLYVYHAMSEDAASHQRFEIMERKLYRGIMWPSLIATLITAHFLVDWGDATRHYHQATWFYLKVALVALLVIYHLACGYYRKKLIGNAHYKSHKFWRFFNEMPTLILFAVVILVVVKPQF

SEQ ID NO: 166 - protein, 150 aa, Acinetobacter
MDAPSDAFLWVKALHIIAVVCWFAALFYLPRLYVYHAMSEDVVSHQRFEIMERKLYRGIMWPAMVATLITAHFLVDWGDATRHYHEALWFYLKVGLVGLLVIYHLICGYYRKKLMENAHYKSHKFWRFFNEMPTLILFAVVILVVVKPTF

SEQ ID NO: 167 - protein, 150 aa, Acinetobacter
MDAPSDAFLWVKALHIIAVVCWFAALFYLPRLYVYHAMSEDAASHQRFEVMERKLYRGIMWPSMIATLITAHFLVEWGDATRHYHQATWFYLKVALVALLVIYHLVCGYYRKKLIGNAHYKSHRFWRFFNEMPTVILFAVVILVVVKPQF

SEQ ID NO: 168 - protein, 150 aa, Acinetobacter
MDAPSDAFLWVKALHIIAVVCWFAALFYLPRLYVYHAMSEDTLSHQRFEIMERKLYRGIMWPSMIATLITAHFLVDWGDATRNYHDALWFYLKVALVGLLVIYHLVCGYYRQKLIGNAHYKSHKFWRFFNEMPTVLLLAIVILVVVKPQF

SEQ ID NO: 169 - protein, 150 aa, Acinetobacter
MDAPSDAFLWVKALHIIAVVCWFAALFYLPRLYVYHAMSEDAVSHARFQVMERKLYRGIMWPAMLATLITAHFLVDWGDATRHYHEAVWFYLKVGLVGLLVIYHLVCGHYRKKLMENAHYKSHKFWRYFNEMPTLILFAVVILVVVKPTF

SEQ ID NO: 170 - protein, 150 aa, Acinetobacter
MDAPSDAFLWVKALHIIAVVCWFAALFYLPRLYVYHAMSEDAVSHQRFEVMERKLYRGIMWPSMIATLITAHFLVDWGDATRNYHDALWFYLKVALVGLLVIYHLVCGYYRLKLIGNAHYKSHKFWRFFNEMPTVLLFAIVILVVVKPVF

SEQ ID NO: 171 - protein, 150 aa, Acinetobacter
MDAPSDAFLWVKALHIIAVVCWFAALFYLPRLYVYHAMSEDAVSHQRFEVMERKLYRGIMWPSMIATLITAHFLVDWGDATRHYHEALWFYLKVGLVGLLVIYHLVCGYYRKKLIGNAHYKTHKFWRFFNEMPTLILFAVVVLVVVKPQF

SEQ ID NO: 172 - protein, 150 aa, Acinetobacter
MDAPSSAFLWVKALHIIAVVCWFAALFYLPRLYVYHAMSKDQASYERFQIMERKLYRGIMWPAMIATLITAHFLVDWGDATRHYHEALWFYFKVGLVGLLIIYHFVCGYYRKKLIDNAHYKTHKFWRMFNELPTVILFAVVILVVVKPQF

SEQ ID NO: 173 - protein, 149 aa, Acinetobacter
MNAPSDAFFWIKALHIIAVVCWFAALFYLPRLYVYHAMSDDTVSHQRFEVMERKLYRGIMWPAMIATLITAHFLVDWGDQFYHYHEALWFYLKVALVGLLVIYHFVCGYYRKKLIGNAHYKTHKFWRFFNEMPTLLLFAIVILVVVKPF

SEQ ID NO: 174 - protein, 150 aa, Acinetobacter
MDAPSDAFLWVKALHIIAVVCWFAALFYLPRLYVYHAMSEDTVSHQRFEVMERKLYRGIMWPSMIATLITAHFLVDWGDATRHYHEALWFYLKVGLVGLLVIYHFVCGYYRKKLIGNAHYKSHKFWRFFNEMPTLILLAVVILVVVKPQF

SEQ ID NO: 175 - protein, 142 aa, Acinetobacter
MWVKALHIIAVVCWFAALFYLPRLYVYHAMSDDATSHQRFEVMERKLYRGIMWPSMIATLITAHFLVDWGDATRHYHEATWFYLKVGLVALLVIYHLVCGYYRKKLIGNAHYKSHKFWRFFNEMPTLILFAVVILVVVKPQF

SEQ ID NO: 176 - protein, 150 aa, Acinetobacter
MDAPSDAFLWVKALHIIAVVCWFAALFYLPRLYVYHAMSDDAVSHQRFEVMERKLYRGIMWPSMIATLITAHFLVDWGDATRHYHEALWFYLKVGLVGLLVIYHFVCGYYRKKLIGNAHYKSHKFWRFFNEMPTLILVAVIILVVVKPQF

SEQ ID NO: 177 - protein, 150 aa, Acinetobacter
MDAPSDAFLWVKALHIIAVVCWFAALFYLPRLYVYHAMSEDAVSHQRFEVMERKLYRGIMWPSMIATLVTAHFLVDWGDATRHYHEALWFYLKVALVGLLVIYHLVCGYYRKKLIGNAHYKSHKFWRFFNEMPTVILLAVVILVVVKPQF

SEQ ID NO: 178 - protein, 150 aa, Acinetobacter
MDAPSDAFLWVKALHIIAVVCWFAALFYLPRLYVYHAMSEDGTSHQRFQIMERKLYRGIMWPSMLATLITAHFLVDWGDATRHYHEALWFYLKVGLVGLLVIYHFVCGYYRKKLMENPHYKSHKFWRFFNEMPTLILLAVVILVVVKPQF

SEQ ID NO: 179 - protein, 150 aa, Acinetobacter
MNAPSEAFLWVKALHIIAVVCWFAALFYLPRLYVYHAMSDDDASHQRFEVMERKLYRGIMWPAMIATLITAHFLVDWGDATYHYHEALWFYLKVGLVGLLVIYHFVCGYYRKKLIGNAHYKSHKFWRVFNEMPTLILLAVVILVVVKPTF

SEQ ID NO: 180 - protein, 148 aa, Acinetobacter
MVSEAFLWVKALHIIAVVCWFAALFYLPRLYVYHAMSDDLASHQRFEVMERKLYRGIMWPAMIATLITAHFLVDWGDATQHYHEATWFYIKVALVGLLVIYHFVCGYYRKKLIGNAHYKSHKFWRFFNEMPTLLLLAIVILVVVKPQF

SEQ ID NO: 181 - protein, 150 aa, Acinetobacter
MNAPSDAFLWVKALHIIAVVCWFAALFYLPRLYVYHAMSDDAISHQRFQVMERKLYRGIMWPAMIATLITAHFLVAWGDATQHYHLAHWFYVKVALVGLLVIYHFVCGYYRKKLIENAHYKSHKFWRFFNEMPTVILLAVVILVVVKPQF

SEQ ID NO: 182 - protein, 150 aa, Acinetobacter
MNAPSDAFLWVKALHIIAVVCWFAALFYLPRLYVYHAMSDDAISHQRFQVMERKLYRGIMWPAMIATLITAHFLVAWGDATQHYHLAHWFYLKVALVGLLVIYHFVCGYYRKKLIENAHYKSHKFWRFFNEMPTVILLAVVILVVVKPQF

SEQ ID NO: 183 - protein, 150 aa, Acinetobacter
MDVPSDAFLWVKAFHIISIVCWFAALFYLPRLYVYHAMSNDAVSHQRFQVMERKLYRGIMWPSMIATLITAHFLVDWGDATQHYHEALWFYLKLGLVGLLVIYHLFCGYYRQKLILDAHYKSHKFWRFFNEMPTFILVAVIILVVVKPHF

SEQ ID NO: 184 - protein, 181 aa, Escherichia
MKTLILFSTRDGQTREIASYLASELKELGIQADVANVHRIEEPQWENYDRVVIGASIRYGHYHSAFQEFVKKHATRLNSMPSAFYSVNLVARKPEKRTPQTNSYARKFLMNSQWRPDRCAVIAGALRYPRYRWYDRFMIKLIMKMSGGETDTRKEVVYTDWEQVANFAREIAHLTDKPTLK

SEQ ID NO: 185 - protein, 181 aa, Escherichia; identical to SEQ ID NO: 184

SEQ ID NO: 186 - protein, 181 aa, Enterobacter
MKTLILFSTRDGQTREIASYLASELKELGIQADVTNVHRIEEPQWENYDRVVIGASIRYGHYHSAFQEFVKKHATRLNSMPSAFYSVNLVARKPEKRTPQTNSYARKFLMNSQWRPDRCAVIAGALRYPRYRWYDRFMIKLIMKMSGGETDTRKEVVYTDWEQVANFAREIAHLTDKPTLK

SEQ ID NO: 187 - protein, 181 aa, Shigella
MKTLILFSTRDGQTREIASYLASELKELGIQTDVANVHRIEEPQWENYDRVVIGASIRYGHYHSAFQEFVKKHATRLNSMPSAFYSVNLVARKPEKRTPQTNSYARKFLMNSQWRPDRCAVIAGALRYPRYRWYDRFMLKLIMKMSGGETDTRKEVVYTDWEQVANFAREIAHLTDKPTLK

SEQ ID NO: 188 - protein, 181 aa, Escherichia
MKTLILFSTRDGQTREIAAYLASELKELGIQADVANVHRIEEPQWENYDRVVIGASIRYGHYHSAFQEFVKKHATRLNSMPSAFYSVNLVARKPEKRTPQTNSYARKFLMSSQWRPDRCAVIAGALRYPRYRWYDRFMIKLIMKMSGGETDTRKEVVYTDWEQVANFAREIAHLTDKPTLK

SEQ ID NO: 189 - protein, 180 aa, Shigella
MKTLILFSTRDGQTREISSYLASELKELGIQTDVANVHRIEEPQWENYDRVVIGASIRYGHYHSAFQEFVKKHATRLNSMPSAFYSVNLVARKPEKRTPQTNSYARKFLMNSQWRPDRCAVIAGALRYPRYRWYDRFMLKLIMKMSGGETDTRKEVVTDWEQVANFAREIAHLTDKPTLK

SEQ ID NO: 190 - protein, 181 aa, Escherichia
MKTLILFSTRDGQTREIASYLASELKELGIQADVANVHRTEEPQWENYDRVVIGASIRYGHYHSAFQEFVKKHATRLNSMPSAFYSVNLVARKPEKRTPQTNSYARKFLMSSQWRPDRCAVIAGALRYPRYRWYDRFMIKLIMKMSGGETDTRKEVVYTDWEQVANFAREIAHLTDKPTLK

SEQ ID NO: 191 - protein, 181 aa, Escherichia
MKTLILFSTRDGQTREIASYLASELKELGIQADVANVHRIEEPQWENYDRVVIGASIRYGHYHSAFQEFVKKHATQLNSMPSAFYSVNLVARKPEKRTPQTNSYARKFLMNSQWRPDRCAVIAGALRYPRYRWYDRFMIKLIMKMSGGETDTRKEVVYTDWEQVANFAREIAHLTDKPTPK

SEQ ID NO: 192 - protein, 181 aa, Shigella
MKTLILFSTRDGQTREIASYLASELKELGIQTDVANVHRIEEPQWENYGRVVIGASIRYGHYHSAFQEFVKKHATRLNSMPSAFYSVNLVARKPEKRTPQTNSYARKFLMNSQWRPDRCAVIAGALRYPRYRWYDRFMLKLIMKMSGGETDTRKEVVYTDWEQVANFAREIAHLTDKPTLK

SEQ ID NO: 193 - protein, 181 aa, Escherichia
MKTLILFSTRDGQTREIASYLASELKELGIQADVANVHRIEEPQWENYDRVVIGASIRYGHYHSAFQEFVKKHATRLNSMPSAFYSVNLVARKPEKRTPQTNSYARKFLMSSQWRPDRCAVIAGALRYPRYRWYDRFMIKLIMKMSGGETDTRKEVVYTDWQQVENFAREIAHLTDKPTLK

SEQ ID NO: 194 - protein, 181 aa, Shigella
MKTLILFSTRDGQTREIASYLASELKELGIQTDVANVHRIEEPQWENYDRVVIGASIRYGHYHSAFQEFVKKHATRLNSMPSAFYSVNLVARKPEKRTPQTNSYARKFLMNSQWRPDRCAVIAGALRYPRYRWYDRFMIKLIMKMSGGETDTRKEVVYTDWEQVANFAREIAQLTNKPTLK

SEQ ID NO: 195 - protein, 181 aa, Escherichia
MKTLILFSTRDGQTREIASYLASELKELGIQADVANVHRTEEPQWENYDRVVIGASIRYGHYHSAFEEFVKKHETRLNSMPSAFYSVNLVARKPEKRTPQTNSYARKFLMSSQWRPDRCAVIAGALRYPRYRWYDRFMIKLIMKMSGGETDTRKEVVYTDWEQVANFAREIAHLTDKPTLK

SEQ ID NO: 196 - protein, 181 aa, Escherichia
MKTLILFSTRDGQTREIASYLASELKELGILADVANVHRTEEPQWENYDRVVIGASIRYGHYHSAFQEFVKKHATRLNSMPSAFYSVNLVARKPEKRTPQTNSYARKFLMSSQWRPDRCAVIAGALRYPRYRWYDRFMIKLIMKMSGGETDTRKEVVYTDWEQVANFAREIAHLTDKPTMK

SEQ ID NO: 197 - protein, 181 aa, Enterobacter
MKTLILFSTRDGQTREIASYLASELKELGIQTDVANVHRIEEPQWENYDRVVIGASIRYGHYHSAFQEFVKKHATRLNSMPSAFYSVNLVARKPEKRTPQTNSYARKFLMSSQWRPDRCAVIAGALRYPRYRWYDRFMIKLIMKMSGGETDTRKEVVYTDWEQVANFAREIAQLTNKPTLK

SEQ ID NO: 198 - protein, 181 aa, Shigella
MKTLILFSTRDGQTREIASYLASELKELGIQTDVANVHRIEEPQWKNYDRVVIGASIRYGHYHSAFQEFVKKHATRLNSMPSAFYSVNLVARKPEKRTPQTNSYARKFLMSSQWRPDRCAVIAGALRYPRYRWYDRFMIKLIMKMSGGETDTRKEVVYTDWEQVANFAREIAQLTNKPTLK

SEQ ID NO: 199 - protein, 181 aa, Shigella
MKTLILFSTRDGQTREIASYLASELKELGIQTDVANVHRIEEPQWENYDRVVIGASIRYGHYHSAFQEFVKKHATRLNSMPSAFYSVNLVARKPEKRTPQTNSYARKFLMSSQWRPDRCAVIAGALRYPRYCWYDRFMIKLIMKMSGGETDTRKEVVYTDWEQVANFAREIAQLTNKPTLK

SEQ ID NO: 200 - protein, 181 aa, Salmonella
MKTLILFSTRDGQTREIASYLASELKEMGIWADVVNLHRAEEPDWDSYDRVVIGASIRYGHYHSAFQEFVKKYATRLNGMPSAFYSVNLVARKAEKRTPQTNSYARKFLMSSPWRPDYCAVIAGALRYPRYRWYDRLMIKLIMKMSGGETDTRKEVVYTDWEQVANFAREIAHLTNKSSAK

SEQ ID NO: 201 - protein, 161 aa, Shigella
MASELKELGIQADVANVHRIEEPQWENYDRVVIGASIRYGHYHSAFQEFVKKHATRLNSMPSAFYSVNLVARKPEKRTPQTNSYARKFLMNSQWRPDRCAVIAGALRYPRYRWYDRFMIKLIMKMSGGETDTRKEVVYTDWEQVANFAREIAHLTDKPTLK

SEQ ID NO: 202 - protein, 181 aa, Citrobacter
MKTLILFSTRDGQTREIASYLASELKELGIWADVVNLHRTEEPEWDSYDRVVIGASIRYGHYHTAFQEFVKKHATRLNGMPSAFYSVNLVARKPEKRTPQTNSYARKFLMSSQWRPDRCAVIAGALLYPRYRWYDRIMIKLIMKMSGGETDTNKEVIYTDWEQVAGFAREIAQLTVKSPVK

SEQ ID NO: 203 - protein, 181 aa, Salmonella
MKTLILFSTRDGQTREIASYLASELKEMGIWADVVNLHRAEEPDWDSYDRVVIGASIRYGHYHSAFQEFVKKYATRLNGMPSAFYSVNLVARKAEKRTPQTNSYARKFLMSSPWRPDHCAVIAGALRYPRYRWYDRLMIKLIMKMSGGETDTSKEVVYTDWEQVANFAREIAHLTNKSSAK

SEQ ID NO: 204 - protein, 181 aa, Citrobacter
MKTLILFSTRDGQTREIASYLASELKELGIWADVINLHRTEELDWQSYDRVVIGASIRYGHYHAAFQEFVKKHATRLNAMPSAFYSVNLVARKPEKRTPQTNSYARKFLMSSQWRPDLCAVIAGALRYPRYRWYDRLMIKLIMKMSGGETDTSKEVVYTDWEQVANFARDIAQLTNKSLAK

SEQ ID NO: 205 - protein, 181 aa, Salmonella
MKTLILFSTRDGQTREIASYLASELKEMGIWADVVNLHRAEEPDWDSYDRVVIGASIRYGHYHSAFQEFVKKYATRLNGMPSAFYSVNLVARKAEKRTPQTNSYARKFLMSSPWRPDHCAVIAGALRYPRYRWYDRLMIKLIMKMSGGETDTSKEVVYTDWDQVANFAREIAHLTNKSSAK

SEQ ID NO: 206 - protein, 181 aa, Salmonella
MKTLILFSTRDGQTREIASYLASELKEMGIWADVVNLHRAEEPDWDSYDRVVIGASIRYGHYHSAFQEFVKKYATRLNGMPSAFYSVNLVARKAEKRTPQTNSYARKFLMSSPWRPDHCAVIAGALRYPRYRWYDRLMIKLIMKLSGGETDTSKEVVYTDWEQVANFAREIAHLTNKSSAK

SEQ ID NO: 207 - protein, 181 aa, Salmonella
MKTLILFSTRDGQTREIASYLASELKEMGIWADVVNLHRAEEPDWDKYDRVVIGASIRYGHYHSAFQEFVKKYSTRLNGMPSAFYSVNLVARKPEKRTPQTNSYARKFLMNSPWRPDHCAVIAGALRYPCYRWYDRLMIKLIMKMSGGETDTSKEVVYTDWDQVAKFAREIAHLTNKPSSK

SEQ ID NO: 208 - protein, 181 aa, Citrobacter
MKTLILFSTRDGQTREIASYLASELKELGIWADVINLHRTEELDWQSYDRVVIGASIRYGHYHAAFQEFVKKHATRLNAMPSAFYSVNLVARKPEKRTPQTNSYARKFLMSAQWRPDLCAVIAGALRYPRYRWYDRLMIKLIMKMSGGETDTSKEVVYTDWEQVANFARDIAQLTNKSLAK

SEQ ID NO: 209 - protein, 181 aa, Salmonella
MKTLILFSTRDGQTREIASYLASELKEMGIRADVVNLHRAEEPDWDSYDRVVIGASIRYGHYHSAFQEFVKKYATRLNGMPSAFYSVNLVARKAEKRTPQTNSYARKFLMSSPWRPDYCAVIAGALRYPRYRWYDRLMIKLIMKMSGGETDTSKEVVYTDWEQVAHFAREIAHLTNKSSAK

SEQ ID NO: 210 - protein, 181 aa, Citrobacter
MKTLILFSSRDGQTREIAAYLASELKELGIWADVFNLHRTEEPDWESYDRVVIGASIRYGHYHSAFLDFVKKHATRLNQMPSAFYSVNLVARKPEKRTPQTNSYARKFLMHSQWRPDRSAVIAGALLYPRYRWYDRIMIKLIMKMSGGETDTRKEVIYTDWEQVASFAREIAQLTDKSSVK

SEQ ID NO: 211 - protein, 181 aa, Salmonella
MKTLILFSTRDGQTREIASYLASELKEMGIWADVVNLHRAEEPDWDKYDRVVIGASIRYGHYHSAFQEFVKKYATRLNGMPSAFYSVNLVARKPEKRTPQTNSYARKFLMSSPWRPDHCAVIAGALRYPCYRWYDRLMIKLIMKMSGGETDTSKEVVYTDWDQVAKFAREIAHLTNKPSSK

SEQ ID NO: 212 - protein, 181 aa, Citrobacter
MKTLILFSTRDGQTREIASYLASELKALGIWADVINLHRTEELDWQSYDRVVIGASIRYGHYHAAFQEFVKKHATRLNAMPSAFYSVNLVARKPEKRTPQTNSYARKFLMSSQWRPDLCAVIAGALRYPRYRWYDRLMIKLIMKMSGGETDTSKEVVYTDWEQVANFARDIAQLTNKSLAK

SEQ ID NO: 213 - protein, 181 aa, Salmonella
MKTLILFSTRDGQTREIASYLASELKEMGIWADVVNLHRAEEPDWDSYDRVVIGASIRYGHYHSAFQEFVKKYATRLNGMPSAFYSVNLVARKAEKRTPQTNSYARKFLMSSPWRPDYCAVIAGALRYPRYRWYDRLMIKLIMKMSGGETDTSKEVVYTDWEQVAHFAREIAHLTNKSSAK

SEQ ID NO: 214 - protein, 181 aa, Salmonella
MKTLILFSTRDGQTREIASYLASELKEMGIWADVVNLHRAEEPDWDCYDRVVIGASIRYGHYHSAFQEFVKKYATRLNGMPSAFYSVNLVARKAEKRTPQTNSYARKFLMSSPWRPDYCAVIAGALRYPRYRWYDRLMIKLIMKMSGGETDTSKEVVYTDWEQVAHFAREIAHLTNKSSAK

SEQ ID NO: 215 - protein, 181 aa, Salmonella
MKTLILFSTRDGQTREIASYLASELKEMGIWADVVNLHRAEEPDWDSYDRVVIGASIRYGHYHSAFQEFVKKYATRLNGMPSAFYSVNLVSRKAEKRTPQTNSYARKFLMSSPWRPDYCAVIAGALRYPRYRWYDRLMIKLIMKMSGGETDTSKEVVYTDWEQVAHFAREIAHLTNKSSAK

SEQ ID NO: 216 - protein, 181 aa, Salmonellaenterica
MKTLILFSTRDGQTREIASYLASELKDMGIWADVVNLHRAEEPDWDSYDRVVIGASIRYGHYHSAFQEFVKKYATRLNGMPSAFYSVNLVARKAEKRTPQTNSYARKFLMSSPWRPDYCAVIAGALRYPRYRWYDRLMIKLIMKMSGGETDTSKEVVYTDWEQVAHFAREIAHLTNKSSAK

SEQ ID NO: 217 - protein, 181 aa, Salmonella
MKTLILFSTRDGQTREIASYLASELKEMGIWGDVVNLHRAEEPDWDSYDRVVIGASIRYGHYHSAFQEFVKKYATRLNGMPSAFYSVNLVARKAEKRTPQTNSYARKFLMSSPWRPDYCAVIAGALRYPRYRWYDRLMIKLIMKMSGGETDTSKEVVYTDWEQVAHFAREIAHLTNKSSAK

SEQ ID NO: 218 - protein, 181 aa, Salmonella
MKTLILFSTRDGQTREIASYLASELKEMGIWADVVNLHRAEEPDWDSYDRVVIGASIRYGHYHSAFQEFVKKYATRLNGMPSAFYSVNLVARKAEKRTPQTNSYARKFLMSSPWRPDYCAVIAGALRYPRYRWYDRLMIKFIMKMSGGETDTSKEVVYTDWEQVAHFAREIAHLTNKSSAK

SEQ ID NO: 219 - protein, 181 aa, Salmonella
MKTLILFSTRDGQTREIASYLASELKEMGIWADVVNLHRAEEPDWDSYDRVVIGASIRYGHYHSAFQEFVKKYATRLNGMPSAFYSVNLVARKAEKRTPQTNSYARKFLMSSPWRPDYCAVIAGALRYPRYRWYDRLMIKLIMKMSGGETDTSKEAVYTDWEQVAHFAREIAHLTNKSSAK

SEQ ID NO: 220 - protein, 181 aa, Salmonella
MKTLILFSTRDGQTREIASYLASELKEMGIWADVVNLHRAEEPDWDSYDRVVIGASIRYGHYHSAFQEFVKKYATRLNGMPSAFYSVNLVARKAEKRTPQTNSYARKFLMSSPWRPDYCAVIAGALRYPRYRWYDRLMIKLIMKMSGGETDTSKEVVYTDWEQVTHFAREIAHLTNKSSAK

SEQ ID NO: 221 - protein, 181 aa, Salmonella
MKTLILFSTRDGQTHEIASYLASELKEMGIWADVVNLHRAEEPDWDSYDRVVIGASIRYGHYHSAFQEFVKKYATRLNGMPSAFYSVNLVARKAEKRTPQTNSYARKFLMSSPWRPDYCAVIAGALRYPRYRWYDRLMIKLIMKMSGGETDTSKEVVYTDWEQVAHFAREIAHLTNKSSAK

SEQ ID NO: 222 - protein, 181 aa, Salmonella
MKTLILFSTRDGQTREIASYLASELKEMGIWADVVNLHRAEEPDWDSYDRVVIGASIRYGHYHSAFQEFVKKYAKRLNGMPSAFYSVNLVARKAEKRTPQTNSYARKFLMSSPWRPDYCAVIAGALRYPRYRWYDRLMIKLIMKMSGGETDTSKEVVYTDWEQVAHFAREIAHLTNKSSAK

SEQ ID NO: 223 - protein, 181 aa, Salmonella
MKTLILFSTRDGQTREIASYLASELKEMGIWADVVNLHRAEEPDWDSYDRVVIGASIRYGHYHSAFQEFVKKYATRLNGMPSAFYSVNLVARKAEKRTPQTNSYARKFLMSSPWRPDYCAVIAGALRYPRYRWYDRLMIKLIMQMSGGETDTSKEVVYTDWEQVTHFAREIAHLTNKSSAK

SEQ ID NO: 224 - protein, 181 aa, Salmonella
MKTLILFSTWDGQTREIASYLASELKEMGIWADVVNLHRAEEPDWDSYDRVVIGASIRYGHYHSAFQEFVKKYATRLNGMPSAFYSVNLVARKAEKRTPQTNSYARKFLMSSPWRPDYCAVIAGALRYPRYRWYDRLMIKLIMKMSGGETDTSKEVVYTDWEQVAHFAREIAHLTNKSSAK

SEQ ID NO: 225 - protein, 181 aa, Salmonella
MKTLILFSTRDGQTREIASYLASELKEMGIWADVVNLHRAEEPDWDKYDRVVIGASIRYGHYHSAFQEFVKKYATRLNGMPSAFYSVNLVARKPEKRTPQTNSYARKFLMSSPWRPDYCAVIAGALRYPCYRWYDRLMIKLIMKMSGGETDTSKEVVYTDWDQVAKFAREIAHLTNKLSSK

SEQ ID NO: 226 - protein, 181 aa, Salmonella
MKTLILFSTRDGQTREIASYLASELKEMGIWGDVVNLHRAEEPDWDSYDRVVIGASIRYGHYHSAFQEFVKKYATRLNGMPSAFYSVNLVARKAEKRTPQTNSYARKFLMSSPWRPDYCAVIAGALRYPSYRWYDRLMIKLIMKMSGGETDTSKEVVYTDWEQVAHFAREIAHLTNKSSAK

SEQ ID NO: 227 - protein, 181 aa, Salmonella
MKTLILFSTRDGQTREIASYLASELKEMGIWADVVNLHRAEEPDWDSYDRVVIGASIRYGHYHSAFQEFVKKYATRLNGMPSAFYSVNLVARKAEKRTPQTNSYARKFLMSSPWRPDYCAVIAGALRYPRYRWYDRLMIKLIMKMSGGETDTSKEVVYTDWEQVTHFAREIAHLNNKSSAK

SEQ ID NO: 228 - protein, 181 aa, Salmonella
MKILILFSTRDGQTREIASYLASELKEMGIWADVVNLHRAEEPDWDSYDRVVIGASIRYGHYHSAFQEFVKKYAPRLNGMPSAFYSVNLVARKAEKRTPQTNSYARKFLMSSPWRPDHCAVIAGALRYPRYRWYDRLMIKLIMKMSGGETDTSKEVVYTDWDQVANFAREIAHLTNKSSAK

SEQ ID NO: 229 - protein, 181 aa, Citrobacter
MKTLILFSSRDGQTREIAAYLASELKELGICTDVVNLHRIEEPDWERYDRVVIGASIRYGHYHSAFLEFVKKHATRLNHMPSAFYSVNLVARKPEKRTPQTNSYARKFLMNSQWRPDRSAVIAGALLYPRYRWYDRMMIQLIMKMSGGETDTRKEVIYTDWEQVASFAREVAQLTPDSLVK

SEQ ID NO: 230 - protein, 176 aa, Salmonella
MKTLILFSTRDGQTREIASYLASELKEMGIWADVVNLHRAEEPDWDSYDRVVIGASIRYGHYHSAFQEFVKKYATRLNGMPSAFYSVNLVARKAEKRTPQTNSYARKFLMSSPWRPDYCAVIAGALRYPRYRWYDRLMIKLIMKMSGGETDTSKEVVYTDWEQVAHFAREIAHLTN

SEQ ID NO: 231 - protein, 181 aa, Salmonella
MKTLILFSTRDGQTREIASYLASELKEMGIWADVVNLHRAEEPDWDSYDRVVIGASIRYGHYHSAFQEFVKKYATRLNGMSSAFYSVNLVARKAEKRTPQTNSYARKFLMSSPWRPDYCAVIAGALRYPRYRWYDRLMIKLIMKMSGGETDTSKEVVYTDWEQVTHFAREIAHLTNKSSAK

SEQ ID NO: 232 - protein, 181 aa, Salmonella
MKTLILFSTRDGQTREIASYLASELKEMGIWADVVNLHRAEELDWDSYDRVVIGASIRYGHYHSSFQEFVKKYATRLNGMPSAFYSVNLVARKAEKRTPQTNSYARKFLMSSPWRPDYCAVIAGALRYPRYRWYDRLMIKLIMKMSGGETDTSKEVVYTDWEQVAHFAREIAHLTNKSSAK

SEQ ID NO: 233 - protein, 181 aa, Citrobacter
MKTLILFSSRDGQTREIAEYLASELKELGVWADVVNLHRTEEPDWKNYDSVVIGASIRYGHYHTAFQEFVKKHATRLNAMPSAFYSVNLVARKPEKRTPQTNSYARKFLMSSPWRPDRSAVIAGALLYPRYRWYDRVMIKLIMKMSGGETDTSKEVVYTDWEQVAIFAREIAQLTNKALLK

SEQ ID NO: 234 - protein, 181 aa, Citrobacter
MKTLILFSSRDGQTREIAAYLASELKELGVCTDVVNLHRTEEPDWERYDRVVIGASIRYGHYHSAFLEFVKKHATRLNHMPSAFYSVNLVARKPEKRTPQTNSYARKFLMNSQWRPDRSAVIAGALLYPRYRWYDRMMIQLIMKMSGGETDTRKEVIYTDWEQVASFAREIAQLTPDSVVK

SEQ ID NO: 235 - protein, 181 aa, Shigella
MKTLILFSSRDGQTREIAEYLASELKELGVWADVMNLHRTEEPEWKNYDSVVIGASIRYGHYHSAFQEFVKKHATQLNTMPSAFYSVNLVARKPEKRTPQTNSYARKFLMSSPWRPDHSAVIAGALLYPRYRWYDRVMIQLIMKMSGGETDTKKEVIYTDWEQVAGFAREIAQLTNKTLLK

SEQ ID NO: 236 - protein, 181 aa, Citrobacter
MKTLILFSSRDGQTREIAEYLASELKELGVWADVVNLHRTAEPDWQNYDSVVIGASIRYGHYHAAFQEFVKKHATRLNSMPSAFYSVNLVARKPEKRTPQTNSYARKFLMSSPWRPDHSAVIAGALLYPRYRWYDRVMIQLIMKMSGGETDTNKEVVYTDWEQVARFAREIAQLTNKASLK

SEQ ID NO: 237 - protein, 181 aa, Enterobacter
MKTLILFSSRDGQTREIAEYLASELKELGVWADVVNLHRTAEPDWQNYDSVVIGASIRYGHYHAAFQEFVKKHATRLNSMPSAFYSVNLVARKPEKRTPQTNSYARKFLMSSPWRPDHSAVIAGALLYPRYRWYDRVMIQLIMKMSGGETDTNKEVVYTDWEQVARFAREIAQLTNKTSLK

SEQ ID NO: 238 - protein, 174 aa, Salmonella
MKTLILFSTRDGQTREIASYLASELKEMGIWADVVNLHRAEEPDWDSYDRVVIGASIRYGHYHSAFQEFVKKYATRLNGMPSAFYSVNLVARKAEKRTPQTNSYARKFLMSSPWRPDYCAVIAGALRYPRYRWYDRLMIKLIMKMSGGETDTSKEVVYTDWEQVTHFAREIAHL

SEQ ID NO: 239 - protein, 181 aa, Citrobacter
MKTLILFSSRDGQTREIAEYLASELKELGVWADVVNLHRTAEPDWQNYDSVVIGASIRYGHYHAAFQEFVKKHATRLNSMPSAFYSVNLVARKPEKRTPQTNSYARKFLMGSPWRPDHSAVIAGALLYPRYRWYDRVMIQLIMKMSGGETDTNKEVVYTDWEQVARFAREIAQLTNKTSLK

SEQ ID NO: 240 - protein, 181 aa, Citrobacter
MKTLILFSSRDGQTREIAEYLASELKELGVWADVLNLHRTAEPDWQNYDSVVIGASIRYGHYHAAFQEFVKKHATRLNAMPSAFYSVNLVARKPEKRTPQTNSYARKFLMSSPWRPDRSAVIAGALRYPRYRWYDRVMIQLIMKMSGGETDTHKEVVYTDWEQVAGFAREIAQLTHKTVSK

SEQ ID NO: 241 - protein, 181 aa, Citrobacter
MKTLILFSSRDGQTREIAEYLASELKELGVWADVVNLHRTAEPDWQNYDSVVIGASIRYGHYHAAFQEFVKKHATRLNSMPSAFYSVNLVARKPEKRTPQTNSYARKFLMSSPWRPDHSAVIAGALLYPRYRWYDRVMIQLIMKMSGGETDTNKEVVYTDWEQVARFAREIAQLTNKALLK

SEQ ID NO: 242 - protein, 181 aa, Citrobacter
MKTLILFSSRDGQTREIAEYLASELKELGVWADVVNLHRTAEPDWQNYDSVVIGASIRYGHYHAAFQEFVKKHATRLNAMPSAFYSVNLVARKPEKRTPQTNSYARKFLMSSPWRPDRSAVIAGALLYPRYRWYDRVMIQLIMKMSGGETDTNKEVVYTDWEQVAGFAREIAQLTNKTLSK

SEQ ID NO: 243 - protein, 181 aa, Citrobacter
MKTLILFSSRDGQTREIAEYLASELKELGVWADVVNLHRTAEPDWQNYDSVVVGASIRYGHYHAAFQEFVKKHATRLNAMPSAFYSVNLVARKPEKRTPQTNSYARKFLMSSPWRPDRSAVIAGALLYPRYRWYDRVMIQLIMKMSGGETDTNKEVVYTDWEQVAGFAREIAQLTNKTLSK

SEQ ID NO: 244 - protein, 181 aa, Citrobacter
MKTLILFSSRDGQTREIAEYLASELKELGVWADVVNLHRTAEPDWQNYDSVVIGASIRYGHYHAAFQEFVKKHATRLNAMPSAFYSVNLVARKPEKRTPQTNSYARKFLMSSPWRPDRSAVIAGALLYPRYRWYDRVMIQLIMKMSGGETDTNKEVVYTDWEQVADFAREIAQLTHKTLSK

SEQ ID NO: 245 - protein, 181 aa, Citrobacter
MKTLILFSSRDGQTQEIAAYLASELKELGISTDVVNLHRTDEPDWERYDRVVIGASIRYGHYHSAFLAFVKKHATRLNRMPSAFYSVNLVARKPEKRTPQTNSYARKFLMNSQWRPDRSAVIAGALLYPRYRWYDRMMIQLIMKMSGGETDTRKEVIYTDWAQVASFAREIAQLTPDSLVK

SEQ ID NO: 246 - protein, 181 aa, Citrobacter
MKTLILFSSRDGQTREIAEYLASELKELGVWADVVNLHRTAEPDWQNYDSVVIGASIRYGHYHAAFQEFVKKYATRLNSMPSAFYSVNLVARKPEKRTPQTNSYARKFLMSSPWRPDHSAVIAGALLYPRYRWYDRVMIQLIMKMSGGETDTNKEVVYTDWEQVARFAREIAQLTNKALLK

SEQ ID NO: 247 - protein, 181 aa, Citrobacter
MKTLILFSSRDGQTREIAEYLASELKELGVWADVVNLHRTAEPDWQHYDSVVIGASIRYGHYHAAFQEFVKKHATRLNAMPSAFYSVNLVARKPEKRTPQTNSYARKFLMSSPWRPDRSAVIAGALLYPRYRWYDRVMIQLIMKMSGGETDTNKEVVYTDWEQVADFAREIAQLTHKTLSK

SEQ ID NO: 248 - protein, 181 aa, Citrobacter
MKTLILFSSRDGQTREIAEYLASELKELGVWTDVVNLHRTAEPDWQNYDSVVIGASIRYGHYHAAFQEFVKKHATRLNAMPSAFYSVNLVARKPEKRTPQTNSYARKFLMSSPWRPDRSAVIAGALLYPRYRWYDRVMIQLIMKMSGGETDTHKEVVYTDWEQVAGFAREIAQLTHKTLPK

SEQ ID NO: 249 - protein, 187 aa, Salmonella
MNNGVTRENIDSFSTRDGQTREIASYLASELKEMGIWADVVNLHRAEEPDWDSYDRVVIGASIRYGHYHSAFQEFVKKYATRLNGMPSAFYSVNLVARKAEKRTPQTNSYARKFLMSSPWRPDYCAVIAGALRYPRYRWYDRLMIKLIMKMSGGETDTSKEVVYTDWEQVTHFAREIAHLTNKSSAK

SEQ ID NO: 250 - protein, 181 aa, Citrobacter
MKTLILFSSRDGQTREIAEYLASELKELGVWTDVVNLHRTAEPDWKNYDSVVIGASIRYGHYHSAFQEFVKKYATRLNAMPSAFYSVNLVARKPEKRTPQTNSYARKFLMSSPWRPDRSAVIAGALLYPRYRWYDRVMIQLIMKMSGGETDTNKEVVYTDWEQVAGFAREIAQLTHKTLPK

SEQ ID NO: 251 - protein, 171 aa, Salmonella
DGQTREIASYLASELKEMGIWADVVNLHRAEEPDWDSYDRVVIGASIRYGHYHSAFQEFVKKYATRLNGMPSAFYSVNLVARKAEKRTPQTNSYARKFLMSSPWRPDYCAVIAGALRYPRYRWYDRLMIKLIMKMSGGETDTSKEVVYTDWEQVAHFAREIAHLTNKSSAK

SEQ ID NO: 252 - protein, 181 aa, Enterobacter
MKTLILFSTRDGQTREIAAYLASELKELGIYSDVVNLNRAEQIAWQDYDRVVIGASIRYGHFHPALDRFVKKHTAVLNKLPGAFYSVNLVARKAEKRTPQTNSYTRKFLLNSPWQPDLCAVFAGALRYPRYRWYDRFMIRLIMKMTGGETDTRKEVVYTDWSQVASFAREIAHLTDNSRLK

SEQ ID NO: 253 - protein, 181 aa, Enterobacter
MKTLILFSTRDGQTREIAAYLASELKELGIYSDVVNLNRVEQISWQDYDRVVIGASIRYGHFHPALDRFVKKHTAVLNKLPGAFYSVNLVARKPEKRTPQTNSYTRKFLLSSPWQPELCAVFAGALRYPRYRWYDRFMIRLIMKMTGGETDTRKEVVYTDWSQVASFAREIAHLTDDSRHK

SEQ ID NO: 254 - protein, 181 aa, Enterobacter
MKTLILFSTRDGQTREIAAYLASELKELGIYSDVVNLNRAEQISWQDYDRVVIGASIRYGHFHPALDRFVKKHTAVLNKLPGAFYSVNLVARKPEKRTPQTNSYTRKFLLNSPWQPDLCAVFAGALRYPRYRWYDRFMIRLIMKMTGGETDTRKEVVYTDWSQVASFAREIAHLTGDSRHK

SEQ ID NO: 255 - protein, 181 aa, Enterobacter
MKTLILFSTRDGQTREIAAYLASELKELGIYSDVVNLNRAEQIAWQDYDRVVIGASIRYGHFHPALDRFVKKHAAVLNKMPGAFYSVNLVARKAEKRTPQTNSYTRKFLLSSPWQPDLCAVFAGALRYPRYRWYDRFMIRLIMKMTGGETDTRKEVVYTDWSQVASFAREIAHLTGDSRLK

SEQ ID NO: 256 - protein, 181 aa, Enterobacter
MKTLILFSTRDGQTREIAAYLASELKELGIYSDVVNLNRAEQIAWQDYDRVVIGASIRYGHFHPALDRFVKKHTAVLNKLPGAFYSVNLVARKAEKRTPQTNSYTRKFLLNSPWQPDLCAVFAGALRYPRYRWYDRFMIRLIMKMTGGETDTRKEVVYTDWSQVASFAREIAHLTGNSRLK

SEQ ID NO: 257 - protein, 181 aa, Enterobacter
MKTLILFSTRDGQTREIAAYLASELKELGIYSDVVNLNRADQITWQDYDRVVIGASIRYGHFHPALDRFVKKHTAKLNTLPGAFYSVNLVARKPEKRTPQTNSYTRKFLLNSPWQPELCAVFAGALRYPRYRWYDRFMIRLIMKMTGGETDTRKEVVYTDWSQVASFAREIAHLTGDSRHK

SEQ ID NO: 258 - protein, 181 aa, Enterobacter
MKTLILFSTRDGQTREIASYLASELKELGIYSDVVNLNRTEQITWQDYDRVVIGASIRYGHFHPALDRFVKKHTAVLNKLPGAFYSVNLVARKAEKRTPQTNSYTRKFLLNSPWRPDLCAVFAGALRYPRYRWYDRFMIRLIMKMTGGETDTRKEVVYTDWSQVASFAREIAHLSRDSQRK

SEQ ID NO: 259 - protein, 181 aa, Enterobacter
MKTLILFSTRDGQTREIAAYLASELKELGIYSDVVNLNRAEQITWQEYDRVVIGASIRYGHFHPALDRFVKKHTAVLNKLPGAFYSVNLVARKAEKRTPQTNSYTRKFLLSSPWQPDLCAVFAGALRYPRYRWYDRFMIRLIMKMTGGETDTRKEVVYTDWSQVASFAREIAHLTDDSRLK

SEQ ID NO: 260 - protein, 181 aa, Enterobacter
MKTLILFSTRDGQTREIAAYLASELKELGIYSDVVNLNRAEQIAWQDYDRVVIGASIRYGHFHPALDRFVKKHTAVLNKMPGAFYSVNLVARKAEKRTPQTNSYTRKFLLSSPWQPDLCAVFAGALRYPRYRWYDRFMIRLIMKMTGGETDTRKEVVYTDWSQVASFAREIAHLTGDSRLK

SEQ ID NO: 261 - protein, 181 aa, Enterobacter
MKTLILFSTRDGQTREIAAYLASELKELGIYSDVVNLNRAEQIAWQDYDRVVIGASIRYGHFHPALDRFVKKHTAILNKMPGAFYSVNLVARKAEKRTPQTNSYTRKFLLSSPWQPDLCAVFAGALRYPRYRWYDRFMIRLIMKMTGGETDTRKEVVYTDWSQVASFAREIAHLTGDSRLK

SEQ ID NO: 262 - protein, 180 aa, Enterobacter
MKTLILFSTRDGQTREIAAYLASELKELGIYSDVVNLNRAEQIAWQDYDRVVIGASIRYGHFHPALDRFVKKHTAVLNKMPGAFYSVNLVARKAEKRTPQTNSYTRKFLLSSPWQPDLCAVFAGALRYPRYRWYDRFMIRLIMKMTGGETDTRKEVVTDWSQVATFAREIAHLTGDSRLK

SEQ ID NO: 263 - protein, 181 aa, Enterobacter
MKTLILFSTRDGQTREIASYLASELKELGVYADVVNLNRTEEISWQDYDRVVIGASIRYGHFHPALDSFVKKHTAVLNALPGAFYSVNLVARKAEKRTPQTNSYTRKFLLGSPWQPDLCAVFAGALRYPRYRWYDRFMIRLIMKMTGGETDTRKEVVYTDWAQVASFAREIAQLTADSKVK

SEQ ID NO: 264 - protein, 181 aa, Enterobacter
MKTLILFSTRDGQTREIASYLASELQELGIYSDVVNLNRTEQIAWQDYDRVVIGASIRYGHFHPALDRFVKKHTAALNKLPGAFYSVNLVARKPEKRTPQTNSYTRKFLLNSPWQPDLCAVFAGALRYPRYRWYDRFMIRLIMKMTGGETDTRKEVVYTDWTQVSSFAREIAHLSPESRRI

SEQ ID NO: 265 - protein, 181 aa, Enterobacter
MKTLILFSTRDGQTREIAAYLASELKELGIYSDVVNLNRAEQIAWHDYDRVVIGASIRYGHFHPALDRFVKKHTAVLNKMPGAFYSVNLVARKAEKRTPQTNSYTRKFLLSSPWQPDLCAVFAGALRYPRYRWYDRFMIRLIMKMTGGETDTRKEVVYTDWSQVASFAREIAHLTGDSRLK

SEQ ID NO: 266 - protein, 181 aa, Enterobacter
MKTLILFSTRDGQTREIAAYLASELKELGIYSDVVNLNRAEQIAWQDYDRVVIGASIRYGHFHPALDRFVKKHTAKLNALPGAFYSVNLVARKAEKRTPQTNSYTRKFLLSSPWQPDLCAVFAGALRYPRYRWYDRFMIRLIMKMTGGETDTRKEVVYTDWSQVASFAREIAHLTGDSRHK

SEQ ID NO: 267 - protein, 181 aa, Enterobacter
MKTLILFSTRDGQTREIASYLASELQELGIYSDVVNLNRTEQIAWQDYDRVVIGASIRYGHFHPALDRFVKKHTAALNKLPGAFYSVNLVARKPEKRTPQTNSYTRKFLLNSPWQPDLCAVFAGALRYPRYRWYDRFMIRLIMKMTGGETDTRKEVVYTDWTQVSSFARDIAHLSPESRRI

SEQ ID NO: 268 - protein, 181 aa, Enterobacter
MKTLILFSTRDGQTREIAAYLASELKELGIYSDVVNLNRAEQIAWQEYDRVVIGASIRYGHFHPALDRFVKKHTAVLNKLPGAFYSVNLVARKAEKRTPQTNSYTRKFLLSSPWQPDLCAVFAGALRYPRYRWYDRFMIRLIMKMTGGETDTRKEVVYTDWSQVASFAREIAHLTGDSRLK

SEQ ID NO: 269 - protein, 181 aa, Enterobacter
MKTLILFSTRDGQTREIAAYLASELKELGIYSDVVNLNRAEEIAWQEYDRVVIGASIRYGHFHPALDRFVKKHTAVLNTLPGAFYSVNLVARKAEKRTPQTNSYTRKFLLGSPWQPDLCAVFAGALRYPRYRWYDRFMIRLIMKMTGGETDTRKEVVYTDWSQVASFAREIAHLAGDSRLK

SEQ ID NO: 270 - protein, 181 aa, Enterobacter
MKTLILFSTRDGQTREIAAYLASELKELGIYSDVVNLNRAEQIAWQDYDRVVIGASIRYGHFHPALDRFVKKHTAVLNKMPGAFYSVNLVARKAEKRTPQTNSYTRKFLLSSPWQPDLCAVFAGALRYPRYRWYDRFMIRLIMKMTGGETDTHKEVVYTDWSQVASFAREIAHLTGDSRLK

SEQ ID NO: 271 - protein, 181 aa, Enterobacter
MKTLILFSTRDGQTREIASYLASELKELGIYSDVVNLNRTEQIAWQDYDRVVIGASIRYGHFHPALDRFVKKHTAVLNKLPGAFYSVNLVARKPEKRTPQTNSYTRKFLLSSPWQPDISAVFAGALRYPRYRWYDRFMIRLIMKMTGGETDTRKEVVYTDWSQVASFAREIAHLSGDSRLK

SEQ ID NO: 272 - protein, 181 aa, Enterobacter
MKTLILFSTRDGQTREIAAYLASELKELGIYSDVVNLNRAEQIAWQEYDRVVIGASIRYGHFHPALDRFVKKHTAVLNKLPGAFYSVNLVARKAEKRTPQTNSYTRKFLLGSPWQPDLCAVFAGALRYPRYRWYDRFMIRLIMKMTGGETDTRKEVVYTDWSQVASFAREIAHLTGDSRLK

SEQ ID NO: 273 - protein, 181 aa, Enterobacter
MKTLILFSTRDGQTREIAAYLASELKELGIYSDVVNLNRAEQITWQEYDRVVIGASIRYGHFHPALVRFVKKHTAVLNKLPGAFYSVNLVARKAEKRTPQTNSYTRKFLLSSPWQPALCAVFAGALRYPRYRWYDRFMIRLIMKMTGGETDTRKEVVYTDWSQVASFAREIAHLTDDSRLK

SEQ ID NO: 274 - protein, 181 aa, Enterobacter
MKTLILFSTRDGQTREIAAYLASELKELGIYSDVVNLNRVGQITWQDYDRVVIGASIRYGHFHPALDRFVKKHTAVLNKLPGAFYSVNLVARKAEKRTPQTNSYTRKFLLNSPWQPDLCAVFAGALRYPRYRWYDRFMIRLIMKMTGGETDTRKEVVYTDWSQVASFAREIAHLSGDSRVK

SEQ ID NO: 275 - protein, 299 aa, Escherichia [sequence omitted]

SEQ ID NO: 276 - protein, 299 aa, Escherichia
MKPDAHQVKQFLLNLQDTICQQLTAVDGAEFVEDSWQREAGGGGRSRVLRNGGVFEQAGVNFSHVHGEAMPASATAHRPELAGRSFEAMGASLVVHPHNPYVPTSHANVRFFIAEKPGADPVWWFGGGFDLTPFYGFEEDAIHWHRTARDLCLPFGEDVYPRYKKWCDEYFYLKHRNEQRGIGGLFFDDLNTPDFDRCFAFMQAVGKGYTDAYLPIVERRKAMAYGERERNFQLYRRGRYVEFNLVWDRGTLFGLQTGGRTESILMSMPPLVRWEYDYQPKDGSPEAALSEFIKVRDWV

SEQ ID NO: 277 - protein, 299 aa, Shigella
MKPDAHQVKQFLLNLQDTICQQLTAVDGAEFVEDSWQREAGGGGRSRVLRNGGIFEQAGVNFSHVHGEAMPASATAHRPELAGRSFEAMGVSLVVHPHNPYVPTSHANVRFFIAEKPGAEPVWWFGGGFDLTPFYGFEEDAIHWHRTARDLCLPFGEDVYPRYKKWCDDYFYLKHRNEQRGIGGLFFDDLNTPDFDHCFAFMQAVGKGYTDAYLPIVERRKAMAYGERERNFQLYRRGRYVEFNLVWDRGTLFGLQTGGRTESILMSMPPLVRWEYDYQPKDGSPEAALSEFIKVRDWV

SEQ ID NO: 278 - protein, 299 aa, Citrobacter
MKPDAQRVKQFLLSLQDDICQRLSAVDGAEFIEDSWQREAGGGGRSRVLRNGGIFEQAGVNFSHVHGDAMPASATAHRPELAGRSFEAMGVSLVVHPLNPYIPTSHANVRFFIAEKPGADPVWWFGGGFDLTPYYGIEEDAVHWHRTARDLCQPFGEDVYPRYKKWCDDYFFLKHRNEQRGIGGLFFDDLNTPDFDRCFAFMQAVGKGYTDAYLPIVGRRKTMSWGERERNFQLYRRGRYVEFNLVWDRGTLFGLQTGGRTESILMSMPPLVRWEYDYHPEDGSPEAALSDFIQVRDWV

SEQ ID NO: 279 - protein, 299 aa, Citrobacter
MKPDAQRVKQFLLTLQESICGQLCAVDGAQFVEDSWQREAGGGGRSRVLRNGGVFEQAGVNFSHVHGDAMPASATAHRPELAGRSFEAMGVSLVVHPLNPYIPTSHANVRFFIAEKPGADPVWWFGGGFDLTPYYGFAEDAVHWHRTARDLCLPFGEEVYPRYKKWCDDYFFLKHRNEQRGIGGLFFDDLNTPDFDHCFAFMQAVGKGYTEAYLPIVERRKAMIWGERERNFQLYRRGRYVEFNLVWDRGTLFGLQTGGRTESILMSMPPLVRWEYDWQPEDGSPEAALSEFIKARDWV

SEQ ID NO: 280 - protein, 308 aa, Salmonella
MKPDAHHVKQFLLRLQDDICQTLSAVDGVNFVEDSWRREAGGGGRSRVLRNGGIFEQAGVNFSHVHGDAMPASATAHRPELAGRSFEAMGVSLVVHPHNPYIPTSHANVRFFIAEKPGADPVWWFGGGFDLTPYYGFEEDAVHWHRTARDLCQPFGDDVYPRYKKWCDDYFYLKHRNEQRGVGGLFFDDLNTPDFDHCFAFMQAVGHGYTGAYLPIVERRKAMVWGERERNFQLYRRGRYVEFNLVWDRGTLFGLQTGGRTESILMSMPPLVRWEYGYQPEEGSPEAALCEFIQVRDWVSLPDNSSVS

SEQ ID NO: 281 - protein, 299 aa, Citrobacter
MKPDAQRVKQFLLSLQDNICQQLSAVDGAEFVEDNWQREAGGGGRSRVLRNGGIFEQAGVNFSHVHGEAMPASATAHRPELAGRSFEAMGVSLVVHPQNPYIPTSHANVRFFIAEKPGADPVWWFGGGFDLTPYYGFDEDAVHWHRTARDLCQPFGDDVYPRYKKWCDDYFFLKHRNEQRGIGGLFFDDLNTPDFDHCFAFMQAVGQGYTEAYLPIVERRKAMSWSERERDFQLYRRGRYVEFNLVWDRGTLFGLQTGGRTESILMSMPPLVRWEYDWQPEANSPEAALSEFIQVRDWV

SEQ ID NO: 282 - protein, 299 aa, Rhizobium [sequence omitted]

SEQ ID NO: 283 - protein, 299 aa, Vibrio
MKPDALRVKQFLLNLQDAICQQLTAIDGAEFVEDSWQRDAGGGGRSRVLRNGGIFEQAGVNFSHVHGDAMPASATAHRPELAGRSFEAMGVSLVVHPLNPYIPTSHANVRFFIAEKPDADPVWWFGGGFDLTPYYGFEEDAIHWHRTARDLCQPFGDDVYPRYKKWCDDYFFLKHRNEQRGIGGLFFDDLNTPDFDHCFAFMQAVGEGYTEAYLPIVERRKAMSWGERERNFQLYRRGRYVEFNLVWDRGTLFGLQTGGRTESILMSMPPLVRWEYDWQPDAGSPEAALSDFIQVREWV

SEQ ID NO: 284 - protein, 299 aa, Enterobacter
MKPDAQQVKTFLLALQDSICQQLAAVDGQTFSEDNWQRDGGGGGRSRVLRNGGVFEQAGVNFSHVHGDAMPASATAHRPELAGRSFEAMGVSLVVHPHNPYVPTSHANVRFFIAEKPGADPVWWFGGGFDLTPYYGFEEDAVHWHRTARDLCLPFGEDVYPRYKKWCDDYFYLRHRQEQRGIGGLFFDDLNTPDFDRCFAFMQAVGNGYTDAYLPIVERRKAMAFGERERDFQLYRRGRYVEFNLVWDRGTLFGLQTGGRTESILMSMPPLVRWEYDYQPEDGSPEAALSEFIRVRDWV

SEQ ID NO: 285 - protein, 299 aa, Enterobacter
MTVDANKVKTFLLQLQDDICQQLSALDGGAFIEDSWQRDAGGGGRSRVLRDGGIFEQAGVNFSHVHGDAMPASATAHRPELAGRSFEAMGVSLVVHPRNPYVPTSHANVRFFIAEKPGADPVWWFGGGFDLTPFYGFEEDAIHWHRTARDLCQPFGEDVYPRYKKWCDDYFFIKHRNEQRGIGGLFFDDLNTPDFDSCFAFMQAVGNGFTDAYLPIVKRRKAAIWGERERNFQLYRRGRYVEFNLVWDRGTLFGLQTGGRTESILMSMPPLVRWEYDYQPQAGSPEAALSEFIKVRDWV

SEQ ID NO: 286 - protein, 299 aa, Enterobacter
MKPDVQQVKAFLLQLQDAICAKLSAVDGKDFVEDSWQREGGGSGRSRVLRDGGIFEQAGVNFSHVHGDAMPASATAHRPELAGRSFEAMGVSLVVHPRNPYVPTSHANVRFFIAEKPGADPVWWFGGGFDLTPYYGFEEDAIHWHRTARDLCLPYGDEVYPRYKKWCDDYFFLKHRNEQRGIGGLFFDDLNTPDFDHCFAFMQAVGNGFTDAYLPIVERRKTTPYGERERDFQLYRRGRYVEFNLVWDRGTLFGLQTGGRTESILMSMPPLVRWEYDYHPQEGSPEAALSEFIKVKEWI

SEQ ID NO: 287 - protein, 300 aa, Kluyvera
MTINVQQVKAFLLKLQDDICQQLERVDGGTFIEDSWQREAGGGGRSRVLRDGSVFEQAGVNFSHVHGDAMPASATAHRPELAGRSFEAMGVSLVVHPRNPYVPTSHANVRFFIAEKPGAEPVWWFGGGFDLTPYYGFQEDAVHWHTVARDLCLPFGEDVYPRYKKWCDDYFHLKHRNEQRGIGGLFFDDLNTPDFDHCFGFMQAVGKGFTDAYLPIVERRKAMAYGERERDFQLYRRGRYVEFNLVWDRGTLFGLQTGGRTESILMSMPPLVRWEYNYQPEEGSPEAALSEFIKVKDWLL

SEQ ID NO: 288 - protein, 299 aa, Trabulsiella
MKPDAQQVKTVLLTLQDTLCQQLSATDGSGFTEDLWQRAAGGGGRSRVLRNGGVFEQAGVNFSHVHGDAMPASATAHRPELVGRSFEAMGVSLVIHPHNPYVPTSHANVRFFIAEKPGADPVWWFGGGFDLTPFYGFNEDAVHWHTTARDLCLPFGDEVYPRYKKWCDDYFWLKHRNEQRGIGGLFFDDLNTPDFDHCFAFMQAVGNGFTDAYLPIVERRKMMPFGEREREFQLYRRGRYVEFNLVWDRGTLFGLQTGGRTESILMSMPPLVRWEYNYEPEKGSPEAALSEFLQVRDWI

SEQ ID NO: 289 - protein, 299 aa, Raoultella
MKPDAHQVKRYLLQLQETICQKLSAIDGGEFVEDSWQREGGGGGRSRVLRDGGVFEQAGVNFSHVHGDAMPASATAHRPELAGRSFEAMGVSLVVHPWNPYVPTSHANVRFFIAEKPGAEPVWWFGGGFDLTPFYGFEEDAVHWHRTAHDLCQPFGEEVYPRYKKWCDDYFYLKHRHEQRGIGGLFFDDLNTPDFDHAFAFMQAVGNGYTDAYLPIVEQRKAMPYGERERNFQLYRRGRYVEFNLVWDRGTLFGLQTGGRTESILMSMPPLVRWEYDYQPEEGSPEAALSEFIQVREWI

SEQ ID NO: 290 - protein, 299 aa, Kosakonia
MTPEIAPVKNALLALQDKICRQLSDIDGATFVEDAWQRAEGGGGRSRVLRDGGVFEQAGVNFSHVHGDAMPASATAHRPELAGRSFEAMGVSLVVHPRNPYVPTSHANVRFFIAQKPGADPVWWFGGGFDLTPYYGFEEDAIHWHRTARDICLPFGEEIYPRYKKWCDDYFYLKHRNEQRGIGGLFFDDLNTPDFDHCFAFMQAVGNGYLDAYLPIVARRKALPYGERERDFQLYRRGRYVEFNLVWDRGTLFGLQTGGRTESILMSMPPLVRWEYNYQPAEGSPEAALSEFIQVKDWV

SEQ ID NO: 291 - protein, 299 aa, Enterococcus
MKPDAAQVKTFLLQLQDNLCQQLSAVDGAPFIEDAWQREGGGGGRSRVLREGRVFEQAGVNFSHVHGDAMPASATAHRPELAGRSFEAMGVSLVVHPLNPYVPTSHANVRFFIAEKPGADPVWWFGGGFDLTPYYGFEEDAVHWHRTARDLCLPFGEEVYPRYKKWCDDYFYLKHRQEQRGIGGLFFDDLNTPDFDHCFAFMQAVGNGYADAYLPIVERRKATPYGERERHFQLYRRGRYVEFNLVWDRGTLFGLQTGGRTESILMSMPPLVRWEYDYQPEPGSPEAALSEFIQVRDWL

SEQ ID NO: 292 - protein, 307 aa, Unknown
  gamma proteobacterium
MNQLPDINQVKAFLLSLQDQICQKLSAVDGRAQFKQDQWVREEGGGGQSRVLTGGAIFEQAGVNFSHVSGATLPASATAHRPELAGRSFQAMGVSLVIHPLSPYIPTSHANVRFFIAEKPGEAPVWWFGGGFDLTPYYGFEEDARHWHQTAADLCQPFGDDVYPKYKKWCDDYFFIKHRNEARGIGGLFFDDLNSPDFAHCFAFMQAVANGFTDAYLPIVERRKTLTWGEREREFQLYRRGRYVEFNLVWDRGTLFGLQTGGRTESILMSMPPLVRWEYGFEPDENSPEAALYRDFLPVRDWLAESE

SEQ ID NO: 293 - protein, 303 aa, Shewanella
MKPDATQVKAFLLDLQQRICEGLEQLDGEAKFVADSWEREEGGGGTSRVLTKGKVFEQAGVNFSHVTGAAMPASATAHRPELAGRSFEAMGVSLVIHPNNPYVPTTHANVRFFIAEKEGADPVWWFGGGFDLTPYYPFEEDVVAWHQSAKALCEPFGEDVYPKYKKWCDEYFFLPHRNETRGVGGLFFDDLNEPGFENSFAFMQAVGEGFLKAYAPIVEKRKETAYGERERDFQLYRRGRYVEFNLVYDRGTLFGLQTGGRTESILMSMPPLVRWQYAYTPEAGSPEAKLYSDFLKPREWLEA

SEQ ID NO: 294 - protein, 302 aa, Oceanimonas
MSSKPDTSAVKAFLLALQDNICRQLEQADGSGRFIEDSWTREEGGGGRSRVLRNGTVIEQGGVNFSHVYGAAMPASATAHRPELAGRSFEAMGVSLVIHPHNPHVPTSHANVRFFIAEKEGAEPVWWFGGGFDLTPFYPVEEDCRHWHQVSKDLCEPFGEDVYPKYKEWCDRYFYLKHRNETRGVGGLFFDDLNEWPFERCFAFMKAVGEGYLDAYLPIIARRKDTPYGEDERQFQLYRRGRYVEFNLVYDRGTLFGLQTGGRTESILMSMPPLARWEYDWQPEAGSREARLQAFLVPRSWV

SEQ ID NO: 295 - protein, 302 aa, Chromobacterium
MSHPHSDAVKAILLDLQDRICAALEGADGDGRFVEDAWQREAGGGGRSRVLSNGAVFEQAGVNFSHVHGDALPASATAHRPELAGRRFEAMGVSLVIHPHNPHVPTSHANVRFFIAEKAGEAPVWWFGGGFDLTPFYPVREDVVHWHTVARDLCAPFGPEVYPRYKKWCDEYFYLKHRNEARGVGGLFFDDLNEWGFDQSFAFMQAVGNGYLDAYLPIVQARKDTAWGARERQFQLYRRGRYVEFNLVWDRGTLFGLQSGGRTESILMSMPPLVRWEYGYQPEPGSAEALLYTDFLPPRDWV

SEQ ID NO: 296 - protein, 302 aa, Pseudogulbenkiania
MSHPHSDAVKSFLLDLQDRICAALEQADGKAQFAEDAWSREAGGGGRSRVLAGGGVFEQAGVNFSHVHGDALPASATAHRPELADRRFEAMGVSLVIHPSNPHVPTSHANVRFFIAEKDGEAPVWWFGGGFDLTPYYPQEEDAVHWHTVARDLCAPFGGEVYPRYKKWCDEYFHLKHRNEARGIGGLFFDDLNEWGFDKSFAFTRAVGDGYLDAYLPIVARRKEQAWGDRERQFQLYRRGRYVEFNLVWDRGTLFGLQSGGRTESILMSMPPLVRWEYGYQPEPGSPEARLYTDFLPPRDWV

SEQ ID NO: 297 - protein, 302 aa, Chromobacterium
MSHPHSNAVKSFLLDLQDRICAALEQADGKAQFAEDAWSREAGGGGRSRVLTGGEVFEQAGVNFSHVHGDALPPSASAHRPELAGRRFEAMGVSLVIHPSNPHVPTSHANVRFFIAEKDGEAPVWWFGGGFDLTPFYPQEEDAVHWHTVARDLCAPFGGDVYPRYKKWCDEYFHLKHRNEARGIGGLFFDDLNEWGFDKSFAFTRAVGDGYLDAYLPIVARRKEQAWGDRERQFQLYRRGRYVEFNLVWDRGTLFGLQSGGRTESILMSMPPLVRWEYGYQPEPGSPEARLYTDFLPPRDWV

SEQ ID NO: 298 - protein, 302 aa, Aeromonas
MSKPDVAQVKAFLLQLQDEICRGLELADGVGHFVEDAWLREGGGGGRTRVLRHGAVIEQGGVNFSHVHGDAMPASATAHRPELAGRRFEAMGVSLVIHPHNPYVPTSHANVRFFIAEKEGEEPIWWFGGGFDLTPFYPFEEDVRHWHQVSRDLCQPFGTDIYPEFKSWCDRYFFLKHRDETRGVGGLFFDDLNRWPFADCFAFMQVVGKGYLDAYLPIVERRKALAYGEREREFQLYRRGRYVEFNLVYDRGTLFGLQTGGRTESILMSMPPLARWEYDWQPPAGSPEALLYSDYLKPREWL

SEQ ID NO: 299 - protein, 310 aa, Glaciecola
MNTELPSHEKIAQVKAFLLKLQDNICQTLELSDGKARFVEDEWEREQGGGGRTRVLTNGAVIEQGGVNFSHVFGDQMPASATAARPELAGRRFQAMGVSLVIHPHNPYIPTSHANVRFFIAEKEGEAPIWWFGGGFDLTPFFPFKEDVVHWHKVAHDLCLPFGEDVYPKYKKWCDDYFYLKHRNETRGVGGLFFDDLNTPDFETAFGFMQAVGNGYLDAYVPIIEKRKNTEYGNMERDFQLYRRGRYVEFNLVYDRGTLFGLQTGGRTESILMSMPPLVRWEYNYVPDEHSAQGKLAAYLTPQDWLAGQS

SEQ ID NO: 300 - protein, 304 aa, Alteromonas
MDGKNAAEVIEQVKSYLLGLQDTICQTLELADGKGQFVEDSWQREEGGGGRSRVLKNGAVIEQGGVNFSHVFGSQMPASATANRPELAGRNFQAMGVSLVIHPHNPYIPTSHANVRFFIAEKEGEAPIWWFGGGFDLTPFYPFKDDVVHWHDTAKKLCKPFGEDVYPKYKKWCDEYFYLKHRNETRGVGGLFFDDLNEWGFEQSFAFMQAVGNGFIDAYVPIVERRKQTDYGERERDFQLYRRGRYVEFNLVFDRGTLFGLQTGGRTESILMSMPPLARWEYCYTPAPGSAEAKLTDWLKPTPW

SEQ ID NO: 301 - protein, 305 aa, Gilvimarinus
MTTTPDKHAVKAYLMDLQERICDSLAAVDGGRFAEDTWQRAEGGGGRSRVLADGAVIEKGGVNFSHVMGDAMPASATAHRPELAGRSFEAMGVSLVIHPANPYAPTSHANVRFFIAEKEGADPVWWFGGGYDLTPFYGFVEDCVHWHKTAFEACAPFGDDVYPRYKNWCDEYFYLKHRNEARGVGGLFFDDLNELGFDQSFAFMRAVGDSYLQAYRPILERRKDSPYGEREREFQLYRRGRYVEFNLVYDRGTLFGLQTGGRTESILMSLPPLVRWEYDFHPEPDSPEARLSRDFLPHQDWLARQ

SEQ ID NO: 302 - DNA, 453 bp, Acinetobacter
atggatgcaccttctgatgctttcttatgggtaaaagcattacatattattgccgtagtatgttggtttgctgccttattctatttacctcgactctatgtttaccatgccatgagtgaggatgacactagtcatcgtcgttttgaagtcatggagcgtaaactttatcgtgggattatgtggccttctatgattgcgacactgatcactgctcattttttggtagattggggcgatgcaacacgacattatcatgaagcactctggttttatatcaaagtcggattggtgggacttttagttatctatcattttgtttgcggctactaccgtaaaaaactgattggcaatgcccattataaatcacacaaattctggcgttattttaatgaaatgccgacactgattttatttgcagtcgtgatcctggtcgtggtcaaaccacaattttaa

SEQ ID NO: 303 - DNA, 1365 bp, Calditerrivibrio
ttatttgtttaagagatttttaaatctatccacattcataaagcttgttctggtgcaatcatttatacccacaccatataagatattaccaccgataaaaatgtcatcaaattttttatagaactcttcaaccttttcaactattttgtggtgcccgatgtagtactgggggattgctttttcccatctaaaatattttattttgtaaggctctctttttatttttaaagtttcttttatgtcatcgaaagccatcctgataagttcatcgtcggatttttcaattatccatctatttttatctccacccattatcgttctaacgattttgtatccatcccttgttctatcagggaatatcgaagaatcaaacagtgctcccaaaattcttttattctctgaatggggtatcagatagccgaagccatccagaggatcttccagatcctccggcttgaatataaacccagcaacaaaaacaggagggtaagtgatgttatttagatccctggatagatctttatcaagaactgagagcatttgggaaacagcataggccggggcatttatgaatattttatcgaactccatgatgcctttattggtatttaatatatatctgtttatttttttatctattgaaaatacttccgtattcaacatctttgtgatgcttgtggattcgagtaaatctgttatcatattatccagtccatttttgtatgaagtaaggattccgccggggcctgatgggccactttttttcccttttttctttatcatccctttaaaaaggccaccataatttatttccagatcccttattacggggaaacaggatcttaagctcatcttttcgggatcacctgcaaaaatgccagagaccattgggctgataaggtattcaagagcttctttccccaatcttcttctggcaaagtctgccacagattcatcttcaaggacacttttttgtatgaaatattcggatagtatcctcatttttgctgagaaggagagtagcttagttttgaaaaacattggtggattttcaggtaatctatgtaaaatcccattgcgcatgatatatctttttcttgctaagtcattacttttgacaagattgttgcttaatcctgccattgatagaagttcaagggtatggggtttgctgtctaaaaaaccatttggccctgcttctactatgaacccatcttcccgtgaggtctctattgaaccgccccacctcaatctcttttctatgattgttatttccatatccagattcagttcatttttcaaattttccaataaaaaagcggtggatatccctgatattccgcctcctattatggctactctcat

SEQ ID NO: 304 - DNA, 1488 bp, Candidatus
atggcgacggaacagcacagcggcagcaggcgtatcgtggtggtggggagcggcatcgcgggtctggctgccgcctatcggctgcaggagcggtgcgagcaggacggcccgccttgcgaggtgcgcgtattggaggccgctgcacggcccggcggtgcgatcagtaccacgcaccgggatggttttgttcttgaatctgggcccgataccattttcaccgataagccgtggggattggatctgatcagacgcctcggtctgagcgagcaggtcatcgggaccaatgaggcgcaccgccggacctttgttgtgcgggacggcgcactgcacccgctgcccgaagggttcgccttgatggggccgaccaagccttggccgtttctgcaatcagggctgctgtcatggcgcggcaaggcaagggcggctctggacctggtactgccgcgagggggaccatccgacgacgagagcctggcgtcgttcgttcggcgtcgtttcggacaggagtttctcgatcggctggcccaaccgatgatcggtggaatctatggcgccgacccggagcggttgagtctgcgcgctaccttcccgcagtttctgcagatggaagcgacgcatcgcagcgtgatcctcggcctgcgacgaatgcgccccgccggccgcggcgtaggtcataccagcagcggcccgcgctatggcctgtttgtcacgctggatcacgggctgcaggccctcgtcgatgccatggtaaaaaggctgccggctgggacgctgcgtctccgcgcgccggttgatagaatcgcgcacacagagcaaggctggaccgttcgacttggagacggcgcgagcctgcaggccgatggccttattctcgccgtccccgcatttgagattgccaggcttacccacgacctggaccaagacctggctcgtcagctcgaggccatgccctacgcctcttcggtcacgatcaatctggcctatcgtagagaggcgatccaccatccgctcgacgggtttggatttgtggtgccggcctgcgaggggcgcaccatcattgcctgttcgttcagcagcgtgaagttcgctcatcgggcgccggccggtcacgtcctgctgcgtgccttcgcgggcggcgcgctgcagccggagccgttcacctgggatgacgagacgctgctgagcgcagtgcgccgcgatctggaggagctgctggcgattcacgcgccgcctttgtggagccagttggtccgacatcctcgtgtgatgccccagtaccaggtcggccacctgggccggttggcggcgctcgaagagacgcttcggcggtggccgaccctcaagctgaccggtaacgcctacagaggtgtcggtgtgccggatgtggttcacagcggggagacggccgccgattcattattggcagagctggccccgtcaccgaccgagccgacccccgcttgtaccgaaggcgattctcgcctataa

SEQ ID NO: 305 - DNA, 1425 bp, Chloroflexus s
atgatggcgggatacgacagtgtagtgattggcggtggcattgccggtttagctgcggcttacacgctccacaagcgtggttatcgggtcctggtcatcgagtcgaccaatcgcgttggcggtgtgatccagaccatcaccacaccagaaggctacattctcgattgtgggccgaacacggtgggtaccggcgatgcgcgattgtggcaggaactgatcgatctgggtctgcgcgagcggatcacaccggcagcgccatgtagcaaacggcggttcatcctgatcaatggtacaccggttgaaatcccaacctcaccagtcgggctgattaccacgcgattactctcgtggcgggggaaattgcgggtactggccgaaccgttcatcaaccgtggatcgaccgatcccgatgaaagcgttgctgccttcttcacccgccggattggtgcagaggctaccgcccacctcctcgatccatttgttgccggcgtctacgctggcgatccgcaacggctctcgactgcggcagtctttccatcactgtgggaagcggcccagcgcagtggcagcatcgtgcgcggcatgctgagcaaacccaaaccgaagactcaggtgagtgagccaaagatgcgcagccgcacctttaccttccgcggtggcctggccgaatggccacgcgctctggcgcaagccctgggtgccggcaatgtctggacagaacggcgcgtggtcaagctccaaccacgcgactcctggtgggaagtgacgattgatggtgtgaacggcccggagacactcatcagtcgcagcctcattatcgccaccccagcctttacggcggctgatctcattgagtcggttgatcaaagagcggctggtgccctacgcggcattccgtatgcgccggtagcagtggtacatctcggctttcgtcgtgaccagatcagccaggaattgagcggctttggtgtgctggccccctcaagcgaacagcgtcagttcctcggcattctctggacatcaagcatcttcccgcacgttgcaccacacgatcatgtcctcaccacaaccctcagtggtggtgctatccggcccgaactggccgaacggagtgacgaaacactgattgaagcggccattcgcgatcatcaccagctcctggggatcagagggcaaccgatcttcacccatgttactcgctggcgaaccgccattgcccagtatacctttgggcaccgcgagcggattgccaccctcgtgcaactcgaacagcgcctgccgaccatccagtttgccggcagctaccgcgacggcgttggagtgcccaaaacctgggccagcggtgtgcaggcaggcgagcggatcgctgcggcactggcagcccatggaactaccgcagtttccacagagacggcgtcggggtga

SEQ ID NO: 306 - DNA, 546 bp, Escherichia
gtgaaaacattaattcttttctcaacaagggacggacaaacgcgcgagattgcctcctacctggcttcggaactgaaagaactggggatccaggcggatgtcgccaatgtgcaccgcattgaagaaccacagtgggaaaactatgaccgtgtggtcattggtgcttctattcgctatggtcactaccattcagcgttccaggaatttgtcaaaaaacatgcgacgcggctgaattcgatgccgagcgccttttactccgtgaatctggtggcgcgcaaaccggagaagcgtactccacagaccaacagctacgcgcgcaagtttctgatgaactcgcaatggcgtcccgatcgctgcgcggtcattgccggggcgctgcgttacccacgttatcgctggtacgaccgttttatgatcaagctgattatgaagatgtcaggcggtgaaacggatacgcgcaaagaagttgtctataccgattgggagcaggtggcgaatttcgcccgagaaatcgcccatttaaccgacaaaccgacgctgaaataa

SEQ ID NO: 307 - DNA, 900 bp, >280 EG1Escherichia
atgaaacccgacgcacaccaggttaaacagtttctgctcaaccttcaggatacgatttgtcagcagctgaccgccgtcgatggcgcagaatttgtcgaagatagttggcagcgcgaagctggcggcggcgggcgtagtcgggtgttgcgtaatggtggtgttttcgaacaggcaggcgtcaacttttcgcatgtccacggtgaggcgatgcctgcttccgccaccgctcatcgcccggaacttgccgggcgcagtttcgaggcgatgggcgtttcactggtagtgcatccgcataacccgtatgttcccaccagccacgcgaatgtgcggttttttattgccgaaaaaccgggtgccgatcccgtctggtggtttggcggtggcttcgacttaaccccattctatggttttgaagaagatgctattcactggcatcgcaccgcccgtgacctgtgcctgccatttggcgaagacgtttatccccgttacaaaaagtggtgcgacgaatacttctacctcaaacatcgcaacgaacagcgcggtattggcgggctgttctttgatgacctgaacacgccagatttcgaccgctgttttgcctttatgcaggcggtaggcaaaggctacaccgacgcttatttaccaattgtcgagcgacggaaagcgatggcctacggcgagcgcgagcgcaatttccagttatatcgtcgcggtcgttatgtcgagttcaatctggtctgggatcgcggcacgctgtttggcctgcaaactggcgggcgcaccgagtctatcctgatgtcaatgccgccactggtacgctgggaatatgattatcagccaaaagatggcagcccagaagcggcgttaagtgagtttattaaggtcagggattgggtgtaa

SEQ ID NO: 308 - DNA, 1326 bp, Hydrogenobacter
atgatagatgtagcggtagtaggggcaggtatatccgggctatccatagcctatcaccttaaaaaggctggacttgaggtaaaggtttttgaaaaagaagatgccgtaggtggaaacatacaaacagcatacatagacggttatgtttgcgagcttggacctcagaccattcttgcggacagtaaagtagaagagtttttaaaagatgcaggtataaagcccatatatgccaatccttcttccaaaaagagatacatatacaggaagggtaagttggtggctcttcctctatcacccgtagaatttctcttatcaccttttctgtccctcggcggaaagctaagagtcctcaaagagccttttgttccaaggtctcccaagcaggaagaaagtatagcggagtttgtcagaaggcgttttgggagggagtttttagattatgtagtagctcctttcgtgtctggagtttacgctggagacccagaggagctatctgttaaatacgcagttagaaaggtttacgagctggagcaaaagtacggaagcgttataaagggagccataaagctcaaagctcttggtccatcgggaaagctcatatcctttgaaggaggaaatgcaactcttataagaaagctctctgaaagtttagaggttcataaagagaatgtggttctgaggataaggagaaaggacgatatttttatcctagataccaaggaggggaaggttacggctaaggcggttgtagtttctactcctgccacatctacaggttatctgctcagggatctgtcttggagcatatccgaggagtttgacaaaatatactacgctcctgttctggtggtgcatgtggcagtaaagtttggtgttctgccagaaggctttggttttttagtgccaaaaaaggaaaacaaaaggatactgggggtgatcttttcatctaatctttttgaaggaaggagtccagagggcaagagtcttatcaccgtatatattggtggtgccacagacccagaaataatagaatacgaagatgaagccattgtaagtgtgctggagagggaactaagagagaccgtagatataagagactgggatcttttaaaaataacgcgctggaaaaagggtataccccaatacactgtggggtacggaaggtatcttgagctggcaaactccatagagatggagcaacccggacttttcttgagtggcaattatctttatggtgtttccgttgcagactgtataagagtttcacatcacatagcaaagagggtaatagactttttggaagttaaggggcgtactgttgtataa

SEQ ID NO: 309 - DNA, 1323 bp, Laribacter
tcagctggccggcgggtagtccagcaagcactggacagccacctgctgccccttgtcgagacagtcgacgaccgataccccgccatgccagttggcacacacgcggataccgtgttcatgcaggtcactgaccgcgctggccagcggcagggcatggctgtcgtactgcggaatggcctgctcctgacgggtcagccggcaaagggtcggctcgccctggatgcggtagagccgccgcagttcttccagcgccagcgccaccagcgtggcgtcatcgtgccggtaacggtcaaggaactgcatgccgccgacaaaggtggtcagcagggtttcgcctgccggcgtgcggtcgggaaacagcgagccggaccagatggagccggcggcaaacggtttttcgactttggggttcagcccgccaaaaccgtcgaggtcatgcccgaccgtgctgcgtggccaggccgtatgcaggacggccaccggggcgtaggttacgttggcaaggttcgctgcaatggccggaaaatggctggccagcagttgcccggccacgtcggccggcacggccagcaccacttcgtcggcgtccagttcacctgctggggttctgacccgccagccggtttccagccgctccagtgcctgcaccgacgtatccagccgtacgtccagcccctgcgccagcgtttcgggcagctgctgcaaaccctcgttcagggtgaaggtggccttgcgccggaaggttttgcggcgggcaaacatgccgcgcacgatggagcctgactggcgctcggcttcgtggatgaccggcagcgtcagtccggccaccagctcttcgggatcaccggcaaaaatgccgccgacaaacggcgaaatggcccgctcgacaaattcgtcgcccagacgacgccggaaaaaggcagccacggtttccggctcacgcaccggccggttgcgccggaaaggctcggtcagcgccagccatttgctccgggcaccgaactgcgatccggtcaggaacgacagcggtccggacggcagggcctcgtagcgatcgccgcgcagcacgaaacggtgccggaccacggccgccgccggccggatggctgccgtgaggcccagccgttccagaaggtccagatgcccggcatggccgtaaagggtattggggccgagttccagccggtaaccgtcggccgctaccgtcccgatcttgccgccgacccggctgccggcctccagcaccacgacggggatgccccgctgttgcaggtgccaggcacacgacaggccggaaatgccggcaccgatcaccaccaccat

SEQ ID NO: 310 - DNA, 1404 bp, Opitutus
ctattgcccggcgcgttccgccagtttttcgccggccgcgatgcaggccgggacggcgatcccgtcgcgggcctgtccccccatgaacagtcccggatggaagcgttcgccggcggcaagagcggcgatgaagtgctcgtgaccgaggttgtactgcgggatggcgcgaggccagaagttgtgccggacaaaaaccgggtcgccgctgacgccgagcaactgcgtgagatcgggccgcacggcggcaagcagctgatcggcgggcaggctggcgagttgcggctggcgtgttccgcccaccatcaccgtcagcgccacgtgtcccagcggcgcgcggcccgggaacagcgaggacgagaacagcacgccaaggaccgagcgcttctcgacggccggcacgagcacgccgaacccgtcgagcggatgcgcgacctgctcgcggcggaagccgaggaagagcgacgagaccggcgggtgttcgatcagcgccagcgcggcgagcggcttttcgccgagcgtgccgatctggagtcgcgcgagggcgggcgcgggcagcgcgaccacgacgctgtcgaagctttgcgtgtgcgtcgccacgtcgtcgtgccaaaccacgttccacttgtcgccgggcacgatggcgtcgagcgaagcgccgagtgtgatggcgccggcggggagacgcgcggcgagcgcctccggcagcacgtgcaggccgtgtttgaaggaaaagatgccggggcgcggctcaccgcgggccttccgggctttggccgcggcgatctggccgcggatcagcgagccgtgggtttgttcgatttcccagagcttggggaacgactgccgcgcggagagcttttcgggatcgccggcatacacgccgcccacgaacggattgagcgcgtagtcgacgaactcgcgcccgaagtgcgactcgacgaattcggcgaggctgacgtcggtcgtgcggacgcgccgccgggcgaacagctcggcgaggagcttgaacttggcgacgggcgaaaacagtgaggaggcgaagaacgacggtggggacatcggcgcggccagcgcgcggccgcggcgaacgatgtagcggtttttcgcggcgggatccgcggcgatgcgttcgccgttcagcccgagttcgtcgatgagcttgtcgacggcgagttcgccggagagcagcgtgttgggtccgccttcgatcagccagccgtcgacttcctccgtcttgatcgagccgccgacgcggtcggattgctcgaacacgcgcaccttgtggccgagctgggtgagccggtgggcggcggtgagcccggtgatgccggcgccaagcacggcgaacgttttgggcggccggcctgaggcggtggcggaaggattaaaaggcgaggtgctcat

SEQ ID NO: 311 - DNA, 1410 bp, Rhodothermus
atggcttctgtgggaatcatcggagccggcattgccggtctgacggccgcctacgaactgcaccgtcgtggcctggaagtgacggtctttgaagccaccgaccgcatcggcggcttcattcagtcggagcggatcgacggctttctggtggagctcggtcctcagacgctccagcgcacctcgggcgacttcgaagagttgctgcgacaggtggatctggaggacgcgtgcattccggcccgaccggtcgcggcgaatcgcttcatcgtgcggggtggccagccgatacccctgccacgctcgccgcgcgaactgctgcgcacgccgctgctttcgccccgggcgcgcctgcgcctgctggccgagccgttcattcaccgggcccaccggagcaccgaggaaagcgtggccaaattcacccggcgtcgactgggtccggaggtgctcgactatctggtagagcccttcgtggccggcatctttgcgggcgatcccgagcagctttcggtgcgctacgccttcccgaaactgttcgaactggagcagcagtacggctcgcttttctggggcctgatccgcgatcggatgaagcagcggtatcatccggccccgcgccgctcgatgttctcgtttgtcgagggcctgcacatgctgccccgggcgctggccgagcggttgcccgcgcacgcgatcgtgcgcaacgcggaggtgctggccatccgctgggacgagaaaaacccctggacgctcacgttccggcagcacggccgcgcttcgacccgttttttcgatatcatcgtctgtgccgtgccgctacaccggctggcgcaactccggattcatcccccggtggatcgccggccgctcagcaccgtcgagcacccgcccattgcgctggtggcgctgggcttccggcgcgagcaggtggcccatccgctggacggcttcgggatgctggtaccggccgtggagcgcgactttcagattctgggcacgctgttctcctcgtcgctctttccggaccgggcgcccgaaggccacgtgctgctgaccacgttcgtcggcggcatgcggcatcccgaactggcgttgctgcccgaagatcggctggaggcgctggtgctgcaggacctgcgccggctgctgggcatctcgggcgcgccggtcttccggcacgtgtggcgctgggagcgctcgatcccgcagtaccggctgggctacgatgcggtgctcgcctgcgttcacgatgtggaaatgagccgctccggtctgtttctggccggcaactacatggaaggcatctccgtgatcgacgcgctccataccggcctgaaggccgcccgcgcgatcatccagcacctgcgcgaagaagcagccggcggtctggccaagctggtgctgggagattga

SEQ ID NO: 312 - protein, 150 aa, Acinetobacter baylyi; identical to SEQ ID NO: 84

SEQ ID NO: 313 - protein, 398 aa, Escherichia coli
MLKVLLLFVLLIAGIVVGPMIAGHQGYVLIQTDNYNIETSVTGLAIILILAMVVLFAIEWLLRRIFRTGAHTRGWFVGRKRRRARKQTEQALLKLAEGDYQQVEKLMAKNADHAEQPVVNYLLAAEAAQQRGDEARANQHLERAAELAGNDTIPVEITRVRLQLARNENHAARHGVDKLLEVTPRHPEVLRLAEQAYIRTGAWSSLLDIIPSMAKAHVGDEEHRAMLEQQAWIGLMDQARADNGSEGLRNWWKNQSRKTRHQVALQVAMAEHLIECDDHDTAQQIIIDGLKRQYDDRLLLPIPRLKTNNPEQLEKVLRQQIKNVGDRPLLWSTLGQSLMKHGEWQEASLAFRAALKQRPDAYDYAWLADALDRLHKPEEAAAMRRDGLMLTLQNNPPQ

SEQ ID NO: 314 - DNA, 1197 bp, Escherichia coli
atgctaaaagtgttattgctctttgtgttgctgattgcggggatcgtggttggcccgatgattgccggccatcagggttatgtgctgatccagaccgacaactacaatatcgaaaccagcgtcacgggcctggcgatcatattgattctggcgatggtagtgctgtttgccattgagtggctactgcggcggatcttccgcactggcgcgcacacccgtgggtggtttgtcggacgtaagcgtcgccgtgcacgtaagcagaccgaacaggcgctgctgaaactggcggaaggcgattatcagcaagttgaaaagctgatggcgaaaaatgccgatcacgcggaacaaccggtggtgaactatctactggctgccgaagccgcgcaacaacgtggtgatgaagcacgcgccaaccaacatctggaacgcgcagcggagctggccggcaacgacaccattccggtagaaatcacccgcgtacgtctgcaactggcccgtaatgaaaaccatgctgcacgccacggcgtggataagctgctggaagttacgccacgccatccggaagtattacgtctggcggaacaggcgtatatccgcacaggtgcatggagttcgctgctggatattatcccatcaatggcgaaagcccatgttggtgatgaagaacatcgtgcaatgctggaacaacaggcatggattggcctgatggatcaggcgcgtgccgataacggtagcgaaggtttgcgtaactggtggaaaaaccaaagccggaaaacgcgtcatcaggtagcgttgcaggtggcaatggcggaacatcttattgaatgtgacgatcatgatactgcccagcaaattatcatcgatggcctgaaacgccagtacgacgatcgcctactgctgccgattcctcgactgaaaacaaacaatccggaacagctggaaaaagtgctgcgccagcaaatcaaaaacgtcggcgatcgcccgctgttgtggagcacactgggccagtcactgatgaagcacggagaatggcaggaagcatcgctcgccttccgcgcagcgctgaaacaacgtccggacgcctacgattacgcatggcttgccgacgcgctggacagactgcacaagccggaagaagctgcagctatgcgtcgcgacggtttgatgttaacgttgcagaataacccgccacagtag
